United States Patent Application Publication US 2025/0235397 A1 - sequence listing, part 6

SEQ ID NO: 11 - DNA, 4093470 bp, Bacillus amyloliquefaciens (residues 1-2,046,735 of 4,093,470)
  source 1..4093470: mol_type = genomic DNA
ttgtaacgattatcggaatgaccttgatgccggttgcgatgaatcacattgccggcggggaagggagcaaggatttcggtgatccggctaaccttgctctcggatttacggtgcttgtcatcattgtgctgctttaccggtttacaaaagggttcttgaaatccatttcgattttaatcggtattgtcatcgggacggctatcgcttattttatgggaaaagtgcaatttgacaatgtggcgaacgctgacgccattcagatgattaaaccgttttacttcgggacgcctacatttcatgcggcaccgattattacgatgtccatcgttgccattgtcagtcttgttgaatcaaccggcgtctatttcgctctcggtgatctgacaaaccggcgcctgtctgaacgcgatttagcaaaaggctaccgcgcggaggggctggcggtattcattagcggcattttcaacgcgtttccgtacacggcctattcccaaaacgtggggctcgtacagctgacgggaattaagaaaaacgcggtcatcggagtcacgggcgtactcttaatgctattcggcctttttccgaaaatcgcagccttcacgacaatcatcccatcttcggtgctgggcggcgcgatggtagctatgtttggcatggtcatttcttacggcattaaaatgcttagccacattgactttaaaaagcaggaaaaccttctgatcgtcgcgtgttcggtcggattgggactcggtgtaaccgtcgttcccgatatgtttaagcatctgccgtcttacctaaatctactgaccacaaacggaatcgtcgccggcagctttaccgccgtgctcttgaatattgtttataatatgattcctaaaacgaaaaaaacccttgatgtgacaagggttcaagagggttagtcacccgtttttcttaaaaaaataacattttaataatatttctttatgaaatcccgagatcgaggatgcttccgaaagtttgctgaactttttgtgaggcatcctctttcattttatttgtaacgtgtcctaaaggacaaatgttcaagatactccaatattatttagtcgttaatccaaccttcaaatattccagtccatgtaccatcactttcctgtctagcttctttcaagtatagtgtcactcccatgaaaactgttttgttaggaatgctccatctagatggatatccagtaagaggaactctttttaaatatgcttgtggtgttattactttttgttccttttcaacactgactgtgttagatgttgctgaagcagcggttgcaaatgcaggtgcagctgaaacaagcagagcaagagacaaggcggaaccagttaagacttttttcattttcattttaaacactccttttctttttttgatacaactgtattattacatattatgttaaaagtgtccatgatcatttttgttaactttttgtgaacatactaataatttacttaaatcgtggttcatgaaagggtgatagaataagcaccatcatataactatcaaaaaagatagctataaaacctgaaaagaaataaaaggtttaaaagaattcattgttgaaaaaggacaattaaaactttaaaagagtgagggaattttggctgaagtgaaatgcacctcttctaaaggtgcaaacaatcgagaaattgaatgtttcgttccacgatgactatagagtttttttgaaactgcatcataacgaggccagaatatttgctgtgctgatttatggcagaaatgcacgcgggggcttcatatacttaatctagaagaaattgaaaaatgttttttaaaagacggagtatattacaattgcacatcttttgatggctgctatttgttaattgtcaaaacaaaaatttctgctgatcggaactatctatggattcttaactaaattgaatatgaacgaatgctccttaattttgaaatttttatagatcggaatattttatctcagggctcaaatgttttgggagtggaatatctatcccgctgagaattattacagaactcaccagtatgatgattaatttttcagctattgcttctgaccatctttaggcatgagcagtacaaaccttttctttttcttcggataggtactgagacgcttctctaaaacctagtacaaacagcaggctgccgctcaagtgacttcaccttcaaaactgttgtatgataagtgcggaagaagctaagaatactgctgtatttcgggaaatgagggtttccatgacatttacggaacgggcgttagccattatcaaacagatacctgaaggaaaagtgatgacgtatgggcaaattgccggccttgcgggaagtccgcggggagcgaggcaggttgtgaggatacttcactccatgagtaaaaagcatcgtcttccttggcaccgggtcatcaatgcaaagggtgaaatcgggttaaaagatgaagagctgttttcagtacagaagctgtctcttgaggctgagggggtagaggtcacgccagaaggacggatcaatctcaatttatacgcatatgatccggaaatgtaaaaaacctgccgtatatatcggcaggtttttcagttgtatgccccgagccggtcagaaaggttttgccggatgtaaggccattcctcatgaaggatggagtagtaggcggtatctctgaggccgccgtcgacatccggaatgtgcgcgcggcggattccttcaaattgggctccgatccgtaaaatcgcagtccgtgagcgctggttgcgaacatcggttttcagcgtcactctgacagcttgccacacgtcaaacgcatgggtcagcatcaaaagtttacactccgtattgacacctgtccgctgcatggaagaggcataccacgtgctgccgatctcacacacttccggagctgcatcgggcggccgcgtaaacactcccacatccataaacctcgtgcttccgacgattcgatccgttttaaggctccgtactgcaaaaggcaatgcaagcccttttccataatcggaaagcgcatgctcaatataacgctttgtttcttggattccgtcaggtacatggctgtaagcgtaagttgttctattttctgaagccgcttcgcagagtgcctgagagtgatcaagcttcatcggctctaactgaacgagtgaccctttaagtatgacgggtgtcagcattcctatcacaaccttttttatgaatggatcaagtataatcgaacggtttgtcattcaaaagggccaatttgcaatgaaaatggcaggtcagcgaaatccttcattcaaacctcgtgcatacattcaggaaaaaagcggaaacctttatgtgaagaggtgatgggtatggcatatgtgttatcggtcggaacgagtattccggagcatcacgtctcgcaagaaaaggcggcggaatttgcgagagggatgtttgccaattcatttaaggatattgaccggctgttaaaagcctttcaaaacggcgaaattgaatcaagacagtttgtacggccgattgaatggtataaaacggaacggggtttttcagaaaagaaccggctgtatacggaagaaaccgttaagcacagcgtggatgcggcggttgattgtttaacaaacccggaatgtttaacaaatccctttccatatgaaaaagtagatgcgatcttttttatttccagcaccgggctttcgacacccagcattgaagcgaaggtgatgaatcagcttcctttttctgcgaaaacaaaacggatcccgatctggggcttaggatgcgcgggcggagcggccgggctgtccagggcgtatgaatactgccgtgcctaccctgaagcatacgtgcttgttatcgcggctgagctttgcagcttaacgtttcagccggaggacaagtcaaaaagcaatttaatcggaacctccctgtttgcggacggaattgccgccgtactaatcggaggggagaaggcgagccggaaagacgtcaaacagccgctcgttccgaggatattcgccactcaatcggtgatgatgccggatgcggaagatgtgatgggctgggaattcaccgacagcggatttcaagtcattttttccagagacattcccactcttgtttcacattggctgaaggataatgttgatgaatttttatatgaacatggagtcctgtctcacgacattaaaacctttcttgcccatcccggcgggaaaaaggtcattgacgcctatttaacgagcctttcaatggacgccgggcagctggcggcatctcagaaggtgctgcaaaaacacgggaacatgtcttcagcaactatttttcatgtcataaaagaacagttgttgcacggacggcagaaagaaaacgaaaaagggctgatcggcgctctcgggccgggattttcgtctgagcttttgctgttcagctgggaaaggggggcatcttaatgttttggctgtttatcatactccttgctgcccagcggattgcggagatgatcgtggcccggcgcaatgagcggaaagtgaaaaaacaaggcgccgtcgaatacggagaagggcattacccctttctcgttctgatgcacgtgctcttttttgtctctcttattgccgaggtggcggcgtttcataaagcgcattctccaaggtgggccgccattatatgtatcattttatttgtgcaggggatcaggtattgggcgcttttatcgctggggcgatattggaatacgaaaatccttgtcgtgccggatgcggagcttgtcaaaaaggggccgtacaggtggatgaagcacccgaactatgcggttgtcatcttagaatttatcttgctaccgctgttatacggggcgtattggacactgtttctcttttcaatccttaatgcctgcatgcttactgtgaggattcgcgccgaagagaaggctttagaagaaaacaccgcaaaatagcgattgaaaatcattctcactcatgataagatgtaaatatgaaaatgattctcattcaaggtggtgccaaaaatgacaatgttatttttatttgcagccgtttgtacatacagctttttaattggttttgtattgaaaaaagtttcgaataaatcgatgtcctcttaagcatctgcggtttttcctgccgcgggtgtttttttctttaacagctgccgatatcggcggcttttttgccgtttcctgaagaaaagtgaaccattcttgtgtaaaatgggagagaggtttttttcagagctttctaaaaacgaaaacgtcatttgatgcgacagacacaaaggggtaaagacacatgacagaagcagaacgccataacagggagattttcagcagaacgggtgccttatacgcacaatttttggatcatcaggatgaaaaacgggccgatcagctcgcggccattatgaaaaaagcggctgatgaagaggtttatatcgcatttaccgggcattattcggcgggaaagtcctctctattaaacacattgctcggtgaagacatactgccgacaagcccgattcccacaagcgccaaccttgttgtcatccggcacggtgcagataaagtcgtgcttcatacgactgacggggcttatgcagaaatcaaaggaagttacgataaagaacaagtgcagcaattctgtaaagacggtgagcaaattgagacggtggaagtctatgcaggctttgaggagtcagagcctcatgcggcctacattgacacaccggggattgattcgacggacgaggcgcattttttatcagccacttcgattcttcaccaggcagacgctttattttacgtcgtccattataatcatgttcattcagaagaaaatatgctgtttctcagctccattaaagaccgtactccgaatctgtttctgatcgtcaaccaaattgacaggcatgatgaaaacgagacgaagtttgaagagtaccggagacaggtggaagatatgctcgaaggcgcgggaataccgaaggaatcgcttttctttacgtctgtcacagagcctgatcatcctttaaacggcattgaaaagctgaaaaaacatctgcagcagctgaaacagcaggcaaaagcaaatttatggtccttaacggaacgaaaggtcgcccgcttagtcaaagagcatacagacatgctcgtaaaagatgataatagcggcggccaagagctgtttgacaaacaagaagcactcgtccgttctgtcgaagctgagcttgaaaataccattcaacaggctgaaacagcagagaaagacatcagaaacgacgtacagaacatattgcaaaacgctaatctgacaccatttgagatgagggagcttgcatctgcttatatcgaatcgcagcagccctcattcaaaaccggacttttcttttcaaaagcgaaaacggcagcggaaaaagagagaaggcaggctgaattctttgccgatatcaaaaaaagaacggaaggggaagcggattggcatattatcgacacatttacgaaagcggccaagcggtatgaagcggaatctgacgaactgatcaagaaaatacaggcgtaccgcacaccgctttctggcgatatcaccgctcaggcccttaagcagggagcggcattttcatctgaatacgtattaacctatacgaaagacctcgcggaaatgatcagacgggaagccaaaagacagacggcggaacttattgaggagctgaccgcttatattcaggcaaaaaacggaccgctcatagagagcctgaaaaaacgacttgagaaagagaggaagataagggatgagctcgcgctatcggcaacagaagaacgcaatgccgaagaaaaagccgcccgcgtccgcgctttgtgggaaggagaatcggcctatgatacggaaagcagcgactggtatttgcgaaaaaaacgccttgcgaatgcgcctgtccaaaaagagaaaccaaaagagactctacatcatgaagtaatccagcctgagaaaaattcgataaaggaacttcccataaaagagcaggtcgatcggttctatgaacttgccgggattcttgactcatcaagcctgttaggaaaacaggcagaagcctttcgaagcagggttaagcggcttgaaaaccgccaatttactttggcgttattcggcggcttcagttccggtaaatcgtcttttgccaatgcgcttgtcggtgaatacgtgcttccttcatcaccgacgccgacaacggccaccatcaacaaaataaccaaaccgcaaggcggcaaaccgcataaatctgcggagatcgtttttaaaacggaagaggagcttgacgctgaaatgcttcagctgacagagctgaaggatgctgacgtaaaggggcgttcactgaacgagagatggaattatgccattaaaaagggaaaagtgccggaagatcttacgccggtgattcagacgatgcttcaggcgtttcatacgtatgaagagcagatccgtcaaaggctgacattgacggtgccggttgaagatttaaaaccgtacgcagctgaagaaaaaacggcctgctgtgtgaaagaagtcaccgtatattatgactgccctctcacgcaaaaaggcatcaccatcgttgatacgccgggagcaagcagtatcaacaagcgccacacggagcttgcctttcaatatataaaagatgctgacgctttcttttatatgacgtactatcagcattctttttcaaaaggagacaggtcttttctgaagaaactcggcctcgtcaaagaatcattcggcatggataaaatgttttttgtcattaacgccgccgatctggcgaaaacggaaagcgagctggaaaccgtcaaagactacgttcgctctgaactttctaaagaaggaattaaccggccgacattatttcatgtgtcaagtaaagaagagcttgcggggcaaaaagaagctttctataacaagttctctgatgtaagaaccggacttgcgcactttattgaagaagatgtaatgagggccagctgcgcccagctgcaaacagaagctgacaaattgtgcgatatggtggaacagcttcacgaatctcttcaccagtcggcagaagaaaaagaaaaaaagaaacagcgtctggagtcttcttatgaaaaagctcttgccgctatttcaaagcgccgtacgtctgaggtcatcattcgaaaagtgatgaaagatacggaagaacagctttatcacattaaacaccgcctgtcgttttatgcgaatgatatgctgaaaaccgctttccatccgggccttcaaaacggtgattggaaacagaatatatcagcggcgctcaaggaagcgctcaaggaattccgttttgaatacattcaagagctgaagacactcgatatccggatgaccggctttattgaacgccatatgactgcggaatggatggaaaactgccggaagcagcttatggaagacggggatttctccatttatgtcagcgctgaaaacgaatttgccgttcagctgaaagaggtcgctccggtaattgacgcctcggcattcactcatcacgtaaaagaagttaaatcgccgaagcaattttttgaacagaacggaaaagcggcatttgtggaaggactcaggctcagcctgcaaaaagtgacagaaaaatggcttgagcaggagaaagaaagcctttcagcacgctatactgagcaggttcgccgtctgcaagaagatatggcggataaaagcctgtcgcagatccgcgagcagcgggacacttatttacaggggcttgcggagaacaccaatgctggggaaattgagtacctttatgaggccgaaaaagcatggaaaaagaaagatgaaatgctgaaaatttaaaaatcaggttggcgggtatataacagtcgtggtagactaaaatgaaaaaagcgagatgaaaccttttatgtcagaagtccataaagcaatttcagcacactccgcaaaacagcatcatcacgtcaagtcatttgtagagcttgaatatcagcgtgaacaagccattgaagcagccgttctcaaatgcagacaaaatgaaccgttcacgacggacgccattaatgaaattaccgcaaaaatgaaccagctggccaaaaaaggcattgtgccggcaagacgttttgtgactgaagagatggtaaaagaattcgtcagcagacagtaatggatgaacatgccgcgtgtggcatcagcgcatactgcgcatactatccgtatcttctctaaggggggatacgacaatgggcagaacaaaactgggaaacagaaatgctcagcagaataacaatgccaaaaagaaaaacggcttcggacaaaaatttgattcctatgccggccgtgaagctgaaaagctgatggcaagcaataaaagacacggtgattgacgaagcggcagcatcttccaaaagggaggatgctgtttttttacggccttctttggtaaaataggaacattgaataaagaaggagtttcgatatatgaataacaaattactgctcgttgacggcatggcgcttttattccgatcatttttcgcgacggccgttcatcgcaattttatgataaatgaaaacggaattccgacaaacggcgtcaatggctttttaaagcatctcattacggcggttgaaacgtttcagcccacacatgtcgtctgctgctgggatatgggaagcaaaacgtaccgtaatgatttgtttcaggattataaggccaatcgaagcgaaccgccgcttgagctgattccgcaatttgatttagcaaaggaagcggcagctgaactcggtattttaaatatcggcataaaaggctatgaagcggatgactgtatcggcacgctctctgccttattttccggtgaagcggaaattacaatcgtaacgggtgataaagacctgcttcaattgctgaataaacaagttcaagtagcgctgctgcaaaagggcatcggcaactataaagtatatacagaggaaattttcagagaagaaacaggggttccgccaaaagcactgattgacataaaggcgctgatgggagacacaagcgacaactaccccggcgttaaaggcatcggagaaaaaacggcgtacaagctgatccgtgagtatgaaaacattgaccgtttattagaaagtctttctttactaccgaagggccagcaaacaaaaattcagcaaagcttaaaagaattggagctgtcaaggcagcttgctgaaatacattgcgaagtgccgttagtctgtacgtttgaagaagcgcttttttcattgaagatggaagaggcagctctcatgctcagacgccaccagataaaaggaattgaaagaatgctcgaaaagctgaacgccagagagatcagctgatccctctagcgttttgtattgcttttttttgcgttgttttcaagggctgatttcgggtctttgtgcgcatttccctccatatttccctgaggattcacgcctccggtcagccggcctttattttcttttctcatagctgttcacctcatttgtaggatgaacagtaagacacaatttcattccggttatttattcagccgaatcgctttttttgcaagctgatcggctgtttgattttgtctgcccggaatccacttaataaaaaacaatggaaatccggcctttaatcggatgatttcgtcaacaaacggctggaaagtcttgtttttcaccgcttccagatctgcggcccgctccacgatatccgaatccgtccggaatgacaccgactcatatccgcgggcggcacacagcttcattccttcaattaaggcgagaaattcagcttcctggtttgaatggtcgccgatcggaattgagaaagattctgttttcccgtcatgcttaatgaaaataccgataccggacgggcccgggtttccggcgctcgcaccgtctacataaatttcagcgggcatcatccgtcactctccgttcggtgtcattcgttttgccgcatatgcataagggacagaaatgagtgataccgcaaatttaatcagataagttgaaataaaaatgctgaaccacactcccgcggaataaacgccgataaaggcgacggcagtgaagataaatgtatccagcagctggctgagcgccgtgcttccgctgtttctgagccagagaagcctgtctgaaggaaagattcgccgaatggcggaatatacataaacatctatcgtttggctgaaaataaaagccaagaggctcccgagcgcaacacgaggcagaaaaccgaaaatcgtctcaagggcaggctgcgcgatatctgaagcagccggtttatataaaagagctccctgcatggcgcatgtcaaagccagcaaagtggaaaagccgagccagacggccttgcgcgcttcccggggaccgtatttttcattcagcacatccgttgcgaagaaaacggtgccgtacatgatatttcccaatgtcgccgtaagcccgaacagctcaactgttttgacaacctgcaagttggcgcacaccgtggcgaaaccgatccatacaaataggcccgttttgccaaatcctttataaaacaaaagaacaatgataaaatgaatgatcgcaaataaaatccataatacatcattaaacaaaacctgctgacttcctttcaatttgagaatggtttgattatagcatacgcccgtcaactaatgaatggtaaggtgatttcaatgaatcttaagccgtatatcgaaatagaagcaaaaggaacaggccctgtctcgtttttttcagaagattggctgaccgttccgaaagcgcgcatgcttgcaagagaagtcagccgctttccttatataaaagacatttattttgaggatgaaaaaggcgcaagctggacgcttaaagagctggaaaagcttactgaagagcttgcgcaagaacctgacgacattacggtgtatttcgacggcggctttgacaaaaaaagcggcctcgccggactcggaattgtcgtgtattactctctcggaggcaagcgccaccgcgtgcggaaaaacaaaagcctaacgcttcaaacgaacaatgaggcggaatatgccgctttgtacgaagcgcttaaggaagtgcaggatcttggcgcaagcagaaattcaatcacgataaaaggggattccctcgtcgttttgcatcagcttgacggcagctggccgtgctatgacgaaacgcaaaatgaatggctcgataaaattgaagcgcttctcaaatccttaaagctgacaccggcatatgaagccgtaaaccgaaaggaaaatcaagaagcggatgaccttgccaaaaaaattctttcaggccggcagattgaaagccgcataacattagatggtaacggagatgactgatattggataaaaaaagcatttataaagaattgacagagcttcaggatgaatattgcaaagactgcttcgtgaaaaagcatttccgtaaggagttcggaaaagcgtacgcacattctttctgcatcaatcaatgcacagtgggggagaagctgaaagcctacggcaaggtgctgacaaatcaataaaaaataaaaccgcagcttctgcggttttattttttgaattcatcgagctgatgctggcaatcgtccagaagcattcgctgctgctgcaggaaatcttggtcgagagcttgcagctcactcgattgtgacatcgttctcgcatcctgaatcgcctggtaagcagattcaagcagtgtggaattttgtccccgagtagccgctcctgttgttttctgggccgtttccaccgctaattcaagctggcgtttatccgtcagtccgttcggaaaaaattcagaatccattaaaaaacacctccgtgaatagtttggagattttttttagaaatatgtacgaaaaatagaaaaaaatacagaaaataagccgatataactattgaacctgattaattaggtcttatttactattattcagggtatcttgggagagaagggaaaaaccagccgtgaatgataatgatttaaaaaaaatccttcagcagacatttaaagaaatatacggtgatttgggaagtttagcggaaatggcgaaaaaaggaatgccgtcaatggagaaacaaattgaagaaatcgagcagcggtgcaagcagaatcttgtagcgatcgagattcagacggcaatcaaataggagaggcatacgcctctcctctatttgtcatctgatcaacatgtattgagtttagagttttacaacattagaagcttgaggtccacgattaccttcgacaatttcaaaagaaacttcttgtccttcttctaatgatttgtatccttctccttcgatagcagtgaagtgaacaaatacatcgtctccgccttcaacttcgatgaagccgaatcctttttcgttattgaaccattttactttaccgttttgcatattgcttaattcctcctagtactgtagcaccttcgtgctaaaaaaaattttgtcatcatccaaccgtacgtatgtaaacgttgttaaatgatggttcaactatacaccatatgggagcgggcgtcaagcggccgctccctattttttatctttatttttccagcagcaaaccttatacggaaaaaacaaaaagcacacgagcgttcgtgtgcttttctttatgataatgccatatctgccttcccggccatcagttcagattcttttataatgtcctgcaaaatgacttcagaagagttggggagatgaaggcttttaatattgttcttcatccggttcagcttttcctcatcggcaagaagggaggtgacagactctaaaatttcttcgtggcggttgaccacgacagccgcaccgcggtcttcaaagaaaatggcgttttccttttcctgtccgggcaccggtttgtacagaatgaccggtacgccgatcgctgtcgcttccgtcagtgtgataccgcctggttttgtaatcatgcagtccgtaatccggaacagctcgtcaattctttctacatagccgagcactttcagccggtcggtattgtcaccttccaggctgctgagtgaatctttcagcgagctgtttttgccgcataccaccacaacctgcacctgatcgtcatgaacgaggttttcgcacagttcttttacgtttttcagcacaccatgcgctcccgccataataagaagaacttttttgtcgggagagagattgtattttttataaatcggctcttttggcattgtttcctcgaattgaggcctgatgggaatgcctgtgatctttacgttgttcggatgagtgccgatttcaatcagtttttccttcacgtaatcggtggcgacataatatttatcaacattttcatgaacccagattttgtgaaggcagaaatcggtcataacgttgaacgtcgggatcacttttccggttctccgtctgtattccggtacgacaatcatcggaaatgtattgataataatgtccggcttatgctcttcgacgagctggcctaaacgtttatttcccattttaaaataaatattgaatttgcgtttattatagattttgtcaactccgtaataaaacaaacgataaaactgtttcccgattgagaagctttttaaataaaggtattgagtaacctctgaaacaatcggatttgactcttgatacaaattggaaaccgtcacattcaagccgagacggagacattgttcgtagagcgttttggccacttgaacatgtccgtttccgtaatttgcagtcaaaattaatacttttttattggtattcaagtaaattcacctcaatgtaatcaacaacaagcaagcttcatgcatcgtaaggagttattgtctatagataaacataacacaagtacatcattttataataagcgcggcaacatatttaaactaaatttaattgatatgttccagtattttaaagttttgttatacccatactgaatcaagagtattttatcatatttttgtcaccgtatcactcaaaacaaaaattaatcccattcatacggggtttcctgatatacataataattcagccaattcataaacaataacgtcgcatgagctttccagcggtttacaggttctttcccgccgggtgcaaaatagtgcttaggagcttctacgtttgaaagatttctttctatatccctctcatactcctgaagaagcgtatcggtatcatattccgggtgtcccgttaagaaaatctgcttttcgtcttttgatacgattaaacagaccccggcttcctcagaaacgctcagcacatccagatccgaagccgcttgcagctgctccgtattaatatctgtatgccgtgagtggggcacatagtatagctcgtcaaatcctcttactaatctctcatgttttttaagaacggtatgctcaaacactccgaatatttttttcggcatctccactttctcaattccgtaatggtagtacaaaccggcttgagcgccccagcagatatggagcgttgaagtgacgttcgttttgctccattccataatttccttcaattcttcccagtaagaaacatcttcaaacggcaggtgctcaatcggagccccggtaataatcattccgtcaaaccgtttgtggcggatgctggaaaattccgtataaaattcatccaaatgctgccttgctgtattttttggagtgtgtgtgctcggaattaagaatgtaaagtgaacttgtaaaggcgagttccccagcagcctgagcagctgggtttccgtttggatttttttcggcatcagatttaaaatgacgatcttctgcggccggatatcctgatgaaaagcccggctttcatccattacaaagatgtgttcactttcaagcacctgcttagccggcagatgatttggtatattgataggcaacatgccacctccgttattccccgttaattttcttcattatagaaatttttaagccatttttcaatccatcccggcgtaataaaccgcaattagcgcataatgacaggataaaaggggcaaatgggcataaaatcggagcggctctttattatgacgggtaaagagacgtttggttccgcgaaaaaagcgtttaccgttaaatggaaggaaaaagcgctttccgtttgttttgcagtgtaaaacaggtaaaataaatgaagaatgaaagaaggagggccgcagatgacaatttacgatataaacgtacggaccataacaggcgaagacgtaacgttatcggcatacaggggcaaagtgatgatcattgtgaatacagcgagcaaatgcggattcacgtcccagcttaagcagcttcaggagctctatgatacatatcagcaggaaggtcttgaaatattaggatttccctgcaaccaatttatgaaccaagaacccggagacgaggcggagattcaggagttctgtgtgaaaaattacggagtcacattcccgatgtttgcgaaagttgatgtcaatggagcaggtgctcatcctcttttcacatatctgacagagcaagcgaaggggatgctcggcacaaaggcgattaaatggaatttcactaagtttattgtggaccgaaacggtgatgtcaaagggcgtttttcttcaaacgtcaatccgaaagagcttgaagatacggtgcagaggcttttggcccgataagaggtgatacggtgaacgaaaaagagcagctggaaaacgtcagggattgggtcagagaaaagcttatcaatgaacgtacgggacatgattggcttcatatttcccgggtcgtaaacctttctgtttatattgcaaaggaagaaggcgcagacttatttgtcactgaggcggccgcgctggttcatgatctcattgatgccaagctcgatgaaagcgaaaggctgacggcaggcgaagtaacagaacggctggctgctttcaacatcgcggagggccccattcaggagatcgcggatattatcacgaggatgtcattcagacacaggaaactgctgaaaaagcggccgctttcattggaggggaaagttgttcaggatgcagacatgcttgatgcgatcggcgctgcgggcatcggcagggcgtttatgtttgccggcgcgaagggtcatccgatgtacggaactccaacaagtgtgctggctcatatagaggataaattaatcacgcttaaagacttaatgaatacaaaaacgggggccgatttggcagaggagcggcatcaatttctattgcagtttgttgcccggattcaaaaagaggccgtggacaaaagctaagcggcgcaatagaacgcttgtgccgactatgttagaataagtgtcagattgtgcataggaggacccaatatgaagattaaatcaatagaaccgacgccgagtcccaatacgatgaaagtgattttgactgaagagcttccggcaggcaaaagcaataattacaagctggaccagacagaaggtgctccggccgtcgtacgtgatattttaaacattgagggagtaaaaggtgtttatcatgttgccgatttcctggctgtggagagaaacgcccgttttgactggaaagaaattctgccgcaagtccgatctgccttcggaatggaacaaacagagcagtctgaaagccgttctgaacaggaatcattcggtgaagtgaaggttttcgtacaaatgttcagcggaattccgatgcaggtcaaattgacagacggcgaacgtgaagaacggttcggtcttccggaacgttttcaacaagccatattaaagctgcgttccgaagcatcaaatgttgtatttgagcgcgcctggaaagaacaaggcgtccgcttcggagattttaccgaaatcgggcacgatgtcacagaagagcttcaggctgcttacagtgatgagcggctcaaacgcttgacagaagcagctgcacagcaaaagggtgaagccaaaccggcagtgcagcggaaggcttataaagtgacacttgatatgcttgatgatgaagactggaagcagcgatatgcccatcttgagcaaatggatccggatgaagacgatttacctgtgttggaaaaggcgcttcatgatccgaaaacctcgattagaagacaagccgtcgtttatttaggaatgattgaaaagccgtctgtgcttccgcttttatacaaagcgcttgaagacaaaacggtgacggtcagaagaacggctggtgactgcctgtcggatatcggcgatgcgagcgccatcccggcaatgatgaaatcgctcagtgactcaagcaaactcgtgcgctggcgtgcggccatgtttttatatgaagtcggtgatgaaagcgcgcttgaagcattaaaagcggcggaagacgatccggaattcgaagtcagcctgcaagtcaaaatggcgattgaacggattgagcacggagaagaggcgaaaggttcagtctggaaacagatgactgaaagcagaaaaaaagaacagttataacaaaaaaggtgcgccgtgcaccttttttgtttgaattcactttttataaaaattatttagaatattgttgaaaaatgattcaaaactctatatagtaagtacaatattaattgttggagggtttttatcgatattctgaaagaaataaaagcgaaacagggcggagccgctgtaaagagcggtatgcaaaatgcgccctgaaataaactgaaaattttaaaaataatacacagagtctaaaaacagtaggaggatcaccatggcagaattacgcagcaacatgatcacacagggaattgacagagcgccgcaccgcagccttcttcgcgctgccggcgtaaaagaagaagacttcggcaagccgtttatcgcggtctgcaattcatacatcgatatcgttcccgggcatgttcacctgcaggaatttggaaaaatcgtaaaagaagcaatcagggaagcgggaggagtgccttttgaatttaacacgatcggagtagatgacggaatcgcaatggggcatatcggcatgagatattcgctgccgagccgtgaaatcattgccgattcagttgaaacggtcgtctcggctcactggtttgacggaatggtctgcattccgaactgcgacaaaattacgccggggatgcttatggcggctatgcggattaatattccaaccatttttgtcagcggggggccgatggcagccggccgcacaagcgacggccgcaagatctcgctttcttcagtatttgaaggtgtaggcgcataccaagccgggaaaatcggcgaaagtgaactgcaggagctggaacagttcggctgtccgacgtgcggatcttgttcgggcatgtttacggcaaactcgatgaactgtctgtctgaagcgctcggtctggcgcttccgggcaacggaacaattcttgcggcttctccggaaagaagagagtttgtgagaaagtcagcggcccaattgatggagactatcaaaaaagacattaagccgcgcgatatcgtcaccgaaaaagcgatcgataacgcctttgcgctagacatggccctcggcggttcaaccaacacagtgcttcatacgcttgcgcttgccaacgaagcgggcgttgaatactctttagaacgcattaacgaagtggctgaacgcgtaccgcatttatcgaaattggcaccggcctcggacgtattcatagaggatctgcatgaagcaggcggagtctcggcggctcttaatgaattatcgaaaaaagagggcgcgctccatcttgacgcgctgaccgtaacaggccggacactcggagaaacaatagcaagtcatgaagtgaaggattatgatgtgattcatccgctcgacaatccgtttactgaaaaaggcggtttggccgtgctgtttgggaatttggctccggacggcgccattatcaaaacaggcggcgtgcaggacgggattacaagacacgaaggccctgctgtcgtctttgattcacaggatgccgcgcttgaaggcattataaaccgcagagtaaaagaaggagatgttgtcattatccgttatgaagggccaaagggcggcccgggcatgccggagatgctcgcaccgacttctcagattgtcggaatggggcttggcccgaaagtagcgcttattacagacggccgtttttcaggagcgtcccgcggcctttcgatcgggcacgtatcgcctgaagcggctgaaggcggcccgctcgcattcgttgaaaacggcgaccatgtcatcgttgacatagaaaaacggattttggacgtgcaagtgccagaagaagaatgggaaaaacgcaaggcggaatggaaaggttttgaaccgaaagtcaaaacaggatatcttgcccggtattccaaactcgtgacaagcgccaatacgggcggaatcatgaaaatttaaatcagcggcctgaacaattgaattccggctccctctatagtatccttgacttcatataaggattttagagggggctgtttttatgtcaatggcttatgaagaatatatgcgccagctggtcgtgccgatgcgccgcgagctgacgggcgcgggttttcaggaattaacgaccgcagaagaagtggaaagctttatggaacaagcagagggcacgacattggtcgttgtcaactccgtgtgcggctgtgccgccggtcttgcccgtccggctgcgactcaagctgttttgcagcatgaaaaagcgcctgatcatacggttaccgtatttgccggtcaagataaagacgcaactgcaaaaatgcgtgaatattttacggggcaggaaccttcctcaccttcaatggcgctgttaaaagggaaagatgtcgttcactttattccccgccacgaaatcgaaggacatgacatggaggaaattatgaaaaatctgacggatgccttcgatgcacactgctaaatgcccgaattccgggcattttctttttggagaaaatgatgattacaaccagttacagaccaagcgaatatacgatacacacagcgcagtcactcagtgacaagctgggtgacacttactgcagccgcaataaacagcccattgaaaaaatgctggaacgttcagcaaacgatcttttggtcatcggaaaggaacggttcgaactttacacgaagcaaggggagaagttcttttttcatccgaatacagcgatgttccgtgcaaagcgttttttgagaggggaagccgagccgatgataaaagcagccggattacgcgagggcgacacttttttagattgcacgctcggtctggcatctgatgcgattttggcaagcatggcagttggaaaaagcggacaagtaatcggcctggagaaaaacaagcttgtttcattgcttgttgaaacagggctccaaacgtgggaaaccggtattgaaccgctgcaaaccgctatgaaacgcattcaagtcaagcatgccgactgctccgattatttgcggaatcttcctgattcatcggtggatgtcatctattttgacccgatgtttcacgaaccagttgaaacgtctgacggcattgcgtcgctccgtgcgctggcagaagagggatttaacgaagagtgcatcacgcatgccgttcgggcggcgaaaaaatgcgtagtgcttaaagaccattggaaaagcccgcggtttgaacgatacggcttcaaggtgctgaaaagaaagacggcgcttttccatttcggtgtcattcatataagctcatgatgtcatgggcttatatgttgttaatcagtgatttccatgacgacaaaataaagcagcgtgagaagtgatacagtcgcaaataaggcgttaatcatctcatcccctcctttttctctttcttattgtaagcggtttatccgctcggtcacagttactaatttcccatattgtatgatcatgcgctgccggacatgacgccgctctttgatctatgctaaaatagagggaaagaggacaataaaacagaggggaacaatatcatgaaattgtggatgaaaaagacccttgtggttctgtttaccattgtaacgttcggcctcgtgtctcctccggctgctttgatgacagacaagccttcaggacagtcgagcagtcttgagcagaatgattacaccgctttttatgatgaacacgccctgcagggggatgagaaggcaaggcgggagcctgaattactgtttcaatcgtatcaggagcagcttctcggtgccgctgaaaatcaatcatttttaaaattcggcagcaaaatttctccggtcattgaagatgattacagaaatgaaattctgccgaaaatcgaagatgtgattacagggcatttagccaagtttcaggatgatgaagcgtatcaggatgtggtcatttccagcaaaccgtcggccggaaaaactgaaaaaatttttcacgtgtataacaggctgacgggtgaagatcttttaaggttccacgtccgccgggatcatcctccgcaagacggctactggtttaattttcattaccataccgctgaagacggatttcaatcacatcatgagctcggcagcatttactgggaccgcaatacgccgcctgactggatgagcgtataataccgtgaagaaataaaaaaatcatttctgagaaattttgcagaaatgattttttattgtgttacactactaaaagactactttaaaaggatgaaaaagatgaaacaatataaagatttgtgccgtcatgtgttagaaaacggagaaaaaaaaggagaccgtacgggaacgggtacgatcagcacgttcggctaccaaatgcggtttaaccttcaggaaggtttcccgatgcttacgacgaaaaaactccattttaaatcaatcgcccatgagctgctttggtttttaaaaggtgacacgaatgtccgctaccttcaggaaaacggagtccgcatctggaacgaatgggcggatgaaaacggagaactcggaccggtttacggctctcaatggcgttcatggcgcggagcggacggcgagacgattgatcaaatctcccggctgattcacgacatcaagacaaatccgaattccagacgtttaatcgtcagcgcgtggaatgtcggcgaaattgatcgtatggcgcttcctccttgccactgtctgtttcagttctatgtcgcggacggaaagctgtcgtgccagctttatcagcgctcagcggatgtatttctcggcgtgccgtttaatattgcgtcttatgcgcttttaacaatgatgatcgcgcatgtgacggggcttgaaccgggtgagttcgttcatacgttcggagacgtccacatttaccaaaaccatgtggagcaggtgaatttgcagctgacaagggatgtccgtccgctgccgaaactgcggtttgcgcgaaacgtggattctatttttgattttgcgttcgaagactttatcattgaggattatgacccgcatccgcatataaaaggagctgtcagcgtatgatatcgtttatttttgcgatggatgaaaaccggctgatcggaaaagataacgatctgccttggcaccttccggatgatctcgcatatttcaaaaaagtgacgacgggacacaccattgtgatggggcggaaaacatttgaatcaatcgggcgtccgcttccgaaccggcgtaacatcgtagtaacctcgcgggatgcatccttattcccgggctgtactgtcgccggctcggctgaggaagtgctcaagctgatcccggctgatgaagaatgctttgtaatcggcggagctcagctgtacagtgcgctcttcccttatgcggacaggctctacatgacaatcattcaccatgtctttgaaggagaccgtttttttccggagtttaatgaagatgaatgggaattgacatcccgccatcagggagtaaaagatgaaaaaaacccttacgattatgagtaccttgtatacgagaaaaagaattgagataaagcagggggacaagaattgattcgttacggctgccttgtaatgtacgttgtatttatgttcatgaaaaatattcaggaatatttcaatcaaaaagagcttgacccgcggctttcttttcaaaaacagatgaggctggtgtacgagcggccgaaagcgtttatgagaggatgcattgacatgtcgggatcggtcatcagcattcatcatgagcagccgataccggacggccctgtattgtatgtgcacccgggattaggcccggctgatcttgtgctgcttgcgggacatcttgaagagccggctggttttatcgccggcgagaaagctttccggatgccgtttctcggaaattggctgaaactgatgggcgtcatttgtgacggagacagccgggatgccgtgcttcaggaggcggaagtccgcctgcaaaaagggcaaagcctgattctttctgaagacggaaaaatcaatccggaggagctggccctgcgtttcgatcttccgattgttccggtcaacacaacgggaacagaccggctgcttcggggcaggttgctgaaacgtctgaaaccggcagacattgaactgcatgtaaagcccgcttattatccggctgttcaaaaacggctccgtgcataaaaaaagcacagtctctcgtaaagagactgtgcttttttatttcagataaaaggaactttgacacaataaaataaaatacagaaaaacatcgaggcgctgccgcctaaaacaaagctgtgccaaatggcgtgatgaaacggaatctttctccaaatgtaaaaaatcgtgccggcggaatacaataagccgccgagaagaagaaggccgaagcccgggcctgacagcgaggcgtacagcggtttaatggcgacaataatcagccagcccatcattaaatagacaagcgttgaaaaaatgataaaccgcttcacgaaaaagattttaaacacgatacctccgacggcaagggaccaaacgataattaacaaagtcaggcctagtgcgcctttaagcggccctaataaaaatggcgtatatgtccccgctattaatacgtaaatagcggaatggtcaacaatctcaagaatgtctttcgtttttttatgctgaatgctgtgcaaaagagtcgagctgagatacagcagcagcattgaggcgccgaaaatcgaaaagctggcgatgtctgtcggcgaaccgtatttcaccgcgaagataatgagaaaaataagcgccgggattgacagcaatacaccgattccgtgtgtaacggcatttgcgatttcttcttttatcgtgaacaattaaatgtcctcctttttaaaggatttgtttttgcagtgattgcaaaaagcccaacccttctaatgtgatttttgttcctgcgcgtccccgtccctttgtgacataattcatcttttctaagtaatcaagcctgtttctgacctgctggggcgtcaatgtcattgtgctgttttcgcttaattcggaaatgctccgtctgctggcgggttcgccttttgcatttaagtctttaattgattccaaaataaacaaaaattcttctttttccatcagtgtcagtcgtttttcttttttcttggctgttttcgctttctggctgtttttaatatacggcgggacatcctcgggataaatcgtgccgccggatgctgccgcagccatataatacgccgcattttgaagctctctgatgttgccgttaaaggtgtgccgttcacatagaggataaacggacggatcgatatgcaaatgctgccccgaagctgccagaatatgctgaagaaggagcggtatatcgctttttcgttcagataaagcagggagcggaagacataacacgtgaagcctgtagaataaatctttgttgaacgtgttttccgcatcggcaagatccgccgtgctgcttgcaatgatgcgggcggaaagcccggcgtccagctcggaaagaaggcgggcctgtactgaaagcggcatgtctccgatttcatataagaataatgttccgtatcgggttctgtttaatgcgccttcagcaccgaacagttcatgctcaagccgctcttcgctttggctgcagtgaacggtaataaacagttcgctgtttctgcgggatttatggtggatcgctgcggccatttgttttttttcggttccgacttcacccgttatgaaaaccggcaaatccgataatgcaaatttggcggccaatcgtttcgcttctaaaaaagatttatgttcgccggctagttgatgaaaagggtcagtctgttcaattacattcattaattggctccttttggttctaattggttcaagtataacacgtttgtgtctgcagaaatatctttttctcataaatcggttcatttatgtttatttacaaaattaaaataattgtcttattatttgaatattcatgttataatggcatattaaatagggatttaaataagaaaggactctgtaaatgaaaccgttgcttaaagaagactctctcatccaggtaaaagacattttaaaagcgcaccaaaacgtaaaggacgttgtgatacatacgcctttgcagaggaatgacagactttctgaaagatatgactgcaatatctatttgaaaagagaagacctgcaggtggtcaggtcatttaagctcagaggggcttataataaaatgaggcagctctcaaaagagcagactgaaaacggaattgtatgcgcaagtgcgggaaaccatgcgcagggggttgcgttttcatgcaaacatctcggcattcacggcaagatttttatgccgtcaaccacaccgagacaaaaggtatcccaagtggagctgttcggaaaagaatttgttgaaatcatattgacgggtgacactttcgatgatgcgtataaaagttctgcggaatgctgtgaaaaggaaaaccgcacgtttattcatccgtttgacgatccggacgtcatggccgggcagggaacggctgccattgaaattttaaatgacattgatgttgaaccgcattttctttttgcgagcgtagggggaggaggactcctatccggtctcggcacttacatgaaaaacatctcgccggatacaaaaatcatagcggtagagccggagggtgcagcctcctattttgaatcgaaaaaagccggacaagtcattgaacttgagaaaatcgataaatttgtcgacggggcggccgtaaaaaaaatcggcgcggaaacgtttcaaacgcttgaaacagtcgtcgatgacgttctgcttgtcccggaaggaaaagtgtgcagcacgattctcgaattatataatcaatgcgccattgtagctgagccggcgggtgcattgtccgtagcagcacttgatctgtacaaggaagagattaaagggaaaaacgtcatctgcttagtcagcggagggaataacgatatcggcagaatgcaggagatgaaggagcgctccatgatttatgaggggctgcagcattattttatcgttaattttccgcaaagagcgggggcgcttcgcgaatacctcgatgaagtgctcgggcctgatgatgacatcacccggtttgaatatacgaaaaaaaataacaaaagcagcggtcctgcattggtcggcattgagctgaagcatcgggaagattatggcgcgctcattgcccgtatgaacaaaaaaggatttcattacgtagaggtgaataaagatcaggatctgtttcacctgttaatctgactttttttagaacggccgcgcaaaatgacagacacgccttctcagattgtatataataaaaagaaaacaatcgaaaaagaaggattgatatcttgttactcaaaagcctagagttcaaacgacgggacgggattcaggtaaaagtgacagaaataccggttgtcacggaaggtgaacattatttttttcaaatccatcagcaccttgagctttatttgagagaagtttttgcttcacaaagtgtgagaacagtgtattcattccgacaatatgttaagcgccgtatgaagtggaaagattacgaggccgttttcaaccaagagatattaaaacataacgcataacggtgcacattccttagcgccttcctttcgataaaggagggtgcgggaatttttttatgacgtaagctgtaagcgttttatccatgggaggaatgaaaatgaaaataatgaaaagcttcgctgctgtcttttgtttgctgctcttgtgcgcctgcggggggaagacgataaaagacccgctgaactatcagattgagccgttttcatatcagaaccaagacgggaaaacagtgtcactgaaaagcctgaagggaaaggtctggattgccgattttatgtttacaaattgtaattctgtctgtccgcccatgacagcccatatgactgaactgcaaaaaaaactgaaggctgagaacctggacgtgcggattgtgtcattcagtgtagatcctgagaatgatacgccgaaacagctgaaagcatttgcttccaaatacccgctttcacttcgcaactgggattttctgaccggttacagtcaaaaggacattgaggattttgcgctgaacagctttaaagccatcgtcaaaaagccggagggagaagatcaggtcatacataaaacttctttttatttagtcgggcctgagggcaaggtgcttaaggattatgacggcgtgcagaaagttccgtatgatgatatcctatcagatgtcaaagcggctgaggagctcaagtaaactggcagattagacattttcaaatctgaaaaaacatgttacactttccactagtagacggggaaggagcaacaagattgaagctgcgaatgttctcattgatcgccggactggctttgcttttatcagcttgttctgtccagcgcaccggttctcatgctgaagaaccgaaaacgaaagatcatattgtcatagctgcggtcggtgattcgttgactgaaggagtaggagatccggagggtttaggatacgtcggcaaggtagcggattccctcaagaaaaagggacatgtgaaaacggtagatattaaaaattatgcggtgcagggcgacaaaacgtcggacctgctgaaaaagcttgatgataaaaaagtacagaaatcattgaatggcgccgactatatcttttttaccatcggcggtaatgatttaatgaaggtgctccgccagaacgtcatgcagctgacggttcagccgtttcaaaaggaagagaaaccttttgaaaaacggtttaaggcgatcatatcaaaaatccgcaagtataatcaaaacgctgagctggtgtatgtcagcatgtataatcccttcacatttacgctgcctgagttaaaagagattaacggggttgtgaccgattggaatcagatcgccgcaaaagagctgaaaaaagatcctcacgccgccgcggtgaatgttgaagacttgttcagtcaaaaaagcggcagcagacggatttcaaaggatgatgattttcatccgaatgcaaaaggatatgcactcatcgccgatcgattgtacggcatcattgaaaaacaagggttaccagcagaatagggtgaaataatgaagaagtggaaatcgctgttttttgttcttctcgcactcaatgtgattgccgccgcggtaatcgtgacattgatggttatgccgggagagcaggcgaaaatacaagatcagacaaaaagcgagtacggttttcatatcacaagttccaaagaatcactttcaaggtttgtgaatgcgtacttaaaagagaaggcatcgaatcagcttgactacaaagtggacatcaataacgacgtgcacgtagcgggtaaaatcaaggcattctcaacatctattaatgcggttgtcacatttgaaccgtccgtgcaaaagaacggtgatgtggttctgaaagtgacgaagttttccttaggcgaattaagcctgccgatcagctttgtgctgaattatatggacagcttttacgaactgccgtcatttgtgcacgtccatccaagtgacaaaagcatcgaggtccgtctgtcggaaatgccgttagacaacggcatgtatgtaaaggcagataaaatcaatctcgacacggatgaaattgaattttcctattatcatccgaaacgataagttttcattaaaaaaacacagatcctttcggggatttgtgttttttcgtttcagcgttttttgtccagtttgctgaacagtttgattaacgttgcaagctcttcatcagagtagcagtcaaaccgtttaaaaaagtattctgtttttttctggttgaagtgatcgacaattttctccccgtcttccgtaatatggattctgataatacgtctgtcctctttagaacggatgcgggtgatccattccttttctactaaagcgtcggtcactgcggtaatgtggcttgcggagacctcaagaatgggagcgaattccgttacttttttaggtccttgttcactgagaatccgcaaaatggtgaattcgtttctggacagctctttatctagaatttcattaacttcatttctgatttgtttaaacacttttcgaagcaaagcttccatatcatacatcatttgtgtccttactttcaaatcatgaacctccaatatgtagtcagcgtggcattcggcttaagcttcccctgaaggaagcagaattatttttattctgtttatacatgctataatataataataccacgtatgaacaaaggagggcacccgtatgtcagaaaaaaaagaaatcgccacatttgcaggcggctgtttttggtgcatggtaaagccgtttgacgaacagcccggaattgaaagagtggtgtccggctatacaggaggccatactgagaatccgacctacgaagaagtgtgcagtgaaacgaccggccatagagaagccgttcaaatcacctttaatcctgatatttacccgtatgaaaagcttgtcgaactgttttggcagcaaatcgacccgactgacgcaggcggccagtttgcagaccggggaagttcatatcaagcggcgatttattaccataatgatgaacaaaaagaaattgctgaagcctcaaaaaaacggcttgaagaaagcggcatttttataaagccgattgtgacagacattttaaaagctgagcctttttatgaagcggaaggctatcatcagcacttttataaaaaaaatcctgatcactacgggcgctaccgtgtaggatccggacgtcaaggatttctggatgaacattggagggacagatagatggctcttaataaagaagaaaaaatcaaatcattaaaccgcatgcagtatgaagtcacacaaaataacggaacagagccgccgtttcaaaatgaattctgggatcacaaagaagaggggctttatgttgatatcgtatcaggaaaacctctgtttacttctctggataaattcgattctcattgcggctggcccagtttcaccaaaccgattgaggaagaagaggttgacgaaaaactggacacaagccatggtatgatccggacggaagtgagaagcaaaacagcggattcccacttaggccacgtttttaacgacggcccggggccaagcggtctccgttattgcattaactctgcggcactccgttttgttccgaaagacaagctgaaagaagaaggctatgaatcctatcagcatttatttgagaaatagagctcggcaatgaggcctgcctatcagacaggccttttttctatgcttttttttcttcatgtaatcgttcaataatctttacgactgtgtcttttgtgatgagcggcgcttgatcggattgatatctggggagattgaccttccggaattccggatgtttggcggggtccggcaaaatcgcgtaaagattgccccattcatacaaagcttctgtctcatgcggagaggtcagttcttcgtgaagcttctcaccggggcgttttcctacttcaacagcggcgggacgcggcagaccgtgccggatcgcatattcctcaaatccgtgaagcagttcttcaagcctcagggactccattttaaaaataaacgtttctccgccctttgtgatcaccgcagattgcagggtaagcatcgctgcgtcatcaatcgacataaaaaacctcgtcatgtttttatccgtaatggtgagcgggccgccttccatcatctgttcaaataaaataggaataacggaaccgcgtgaaccgagcacattgccgaagcggaccgaacaaaacaccgtaccgcggttttgaacatggtgatttgcctgatgaaacagcttctcggacaacagcttcgtagctcccattgtgtttaccggagaaacggctttatcggttttttaggatattaaccagaaggcgaagaattccctgtcaaaaaaggatatcggagtacaggaaggatttcaaactgagctggaatgggtccttttcgtctggcagtcattttgactatcactttttgaaaaatgattcttaaaagtttatttttctcttcccggctttccgcggtttcatatatatgtgcggcatacggtataagggagctgaagcaggcagtatcaatttccggtttgcggccggaggaatgattcatttcctttttcacttgctctaggccgttcatttcctcgtccaaggcagacttcctctgtaaaaacatttcatctgaatagattccgttctcgtatttatcaaaaatgaaatgtaatttattgtgaagttccttctcgcgccgcttaagctgttctttcatttgttcttcggcctttatgctgtttctgctttcgtatgcagtgatcattgattcgatttgtgtaaacaattcttttttgtttaatgagtcaagagacctcaaataatccaagatcgcatcttcgacatcatcatatctgacgttcatacatgtattgcggcacctcagcagcttcatatgatatacgctggttgtgccgtccttattgcggcgttttcgtctggcttcatattttgacagcggtgctccgcattcagcgcatgtacagacacccgctaaggcatttaattgaaaatcacttctggcggggagaagagggattttgtgccggatctttttttgcacctgatcgaattgttctttatcaataataggagcatgtgcatcaggaacagatatttgctcgctttcaggtcttatcaggcgtttgccgtcttttgttttttccctgaccttatatttaacagtgccgatataagcttcattttgaagaatggctttaacggtggaaggattccatttctttttaccggatggagaggggatcttaagcgccgttaagtgggaagaaatcgcagtgtagctgtaatctttcccattcagcccatttaaaaaaagattgaagatcaatcggacgactttcgcgttttcatcagccgcttccagcttggattgttttttgtttaaagtgtacccgtacggcgccataccggatatccattttccttgagcggcgtaagtatatttggcgcccgtcatccgttctcttgtcatttcaaactcttctctggccataaataactcgaagcggatctgtctcatgtcggcaggatttctcgggtcatatactttataaggcgtaataatcagaagtctgcggctctgcagcagattgacgatccgcccggcatcactatagcttcctctgctgagacgagtgatttctttgactgcaatcgcttgaaatgcaccattttcaaggtcccgtaaacaatcttgaaaaatcggccggccttcaatgctttcacctgatccgatttccatttttaaagtaaaagggacttgaatagcggttaacacgctttccatcagttccttttgttccgtcaatgtatcttcgccggttcttttttcgcgttccgcatcctggcgtgagcgtctgatataccctaaaatactcgtaatctcataagattgaacaatggatcgcaagtccaaaacttcacccccatacatgttcatagttgcgcagaagggtttcaagccgtctgtttccggtcaaatacagcttcggtaagtgaaaggatggccgcagcaacggtgagaacatgttgcggaatgaaaataccgcttacgatgctgtcagcaatatataaggtaatgaagctgatgatgaaatcggttatcattttcagcaaacggtacagcgctttgtttttgaccgttacagcggccgccgtcagcaggatttttccgataaactcaaaaaagcttccgatcaaaatgaccgacaggatcaagaggaaaatggaacggtttgattcatatgtaatcccgaaaagtttgaaaaagccgataacgccgaaaaataaaggaaaagcaaataatatgagggcgatcagaatgagcaggcagaatccaagaatgacagctgtgttgattttatattttgagtttttacaggacatggcttcacgacacccccgcaccattgttttcgctattttatcacgttttggaaataaaaggagagagccgtgttattgactgtctccctcatctccataactcggcggataagcgccgaattgacgtgaatagagcattgtcaaccattgatcatgccttttaacaagcgttaatatttcatttgtggccgccagttgctgtgtcatgattttgtgcaggcggcggatttgcttttgattcatgcagtcaggctggcctatgcagcagtaaaaaaattgcgggtgccaatacatcatattcctccttatctgtgtcattcagaaatatgctgaagcagggaacggtcgatatctgaaatggacttgatcccggcatttgtcatacttatatcaatatctcttatgaaatgacttatcacgcgcctgacgccggaactccccgcgacagctaagccatatacataggtgcggcctaaaaaaaccgccgaggccccgagggcgagtgctttaatgacatcgctgcctcctcggattccgctgtctaaaaggacgggtatacggttttgaaccgtttcagatattttcggcagagctttgagtgaagctatttctccattcagctgtcttccgccgtgattggaaacgatgatgccgtctgcgccgtattgtacggctaattccgcatcgcggggatcgagaatgcctttcagcagaatggggaggtttgtatgtgttcgcaggcaggcaagatcgtcccaggtcagagagggttcgtgaaaaatatctataaaaaaagcgattgcagtattcatgtctttttcgggaggcagcttaagcctagaccgaaagacgggatcagtcagaaaatttgcgattcccaatcctttttttgacggatgataaccgttgcgtatatctctttcccgccatccttgttccggcagatcgagcgtgacaacgatggctgaataccccgcttgctctgcccgccgaacgaaactgatcatgatatcccggtctttcggccaatacagctgaaaccagcggggacattttcccataaccgccgcaacgtcctcaattgagtaagaggagtgagtgcttaatataaacggaatccctgtttcagccgccgcttttgccgatgccaagtcaccatgaggatgagcgatctcctgcaccccgatcggagccagaagaaagggggcggggaacgtctgaccgaacagagacacagttatattccgtttggatacatctcttagtttgcgggggcggatattccattcaaaaaacgcttctctgtttgagcgcatcgtatcctctgagcctgctccgcctgagatatagccgaacgggccgtcaggcaaaatccggcgcgccctgtactcccattcgtcatgcgacacggggagcttttgggcatgagaggaaacgttcctgtcccgtgaatcaaactcattgttcattcatcaaaccccccgctcatttttttctagggtatgaaacctgcccagtccttgttcataccgattaaaagaattcttccaagcggccgacggataagtgcgaacagctaaatgtaaagattgtccaaaaaaataacacccgcagtgtctgcggatgtttgtccaaaaagttctatagtcagcgggcttcgacggtaattttatatatgacgtaattatcattcacatcataggcgtatacgacagcggtgccaagtgacgaatgggaggatacaacaccggaagagctgatgctgatcagattgcttccggatataatttcccagcgcttatagccgtttaataaggacacgttggagtttctcagcatatgataatcaacggtggtaatgggactgccgagctgtacaacctgatcagggcctgcggcttcatgagctgacacagaaccggtaaatgacggaagagccaatgcggaaatggacaaagcagatacaatcaatcctttgcaacactttttcatcagaaatgcctccccataaatttaatcgcggtacaacgccagtatagcatgtaaaatattagaaataagtggattttttgtgaaattgattggttgaaacgccgacgtcaaactacccctcatgccgcatcactaaagagcagtcaagagacaatcatctgctgacatataatgctcctgtgaaaacggggggttatgagatgccttctgaggaatatgaaaaatataagaagagaacgataaagaccgttcaaaagggaaattattgcataaggattgtcgatcagacagacggaacaaaaaatgaaagagtgttttatcaggaattagcgcggctgttatttgaaagggctctgaagaaatcaaaatagccctttctttttgtttgttttatcgttcatatctaaaaaaaccgttttatcggtactgatattaatcacatgcgtcacctcttgcagcaaagcggcttctgcgacattttgtccgccgataaggttggtttgaatggcttcaaacggatgatcctcacaagtcggaacctgcttcagcgcagcggcgtgaaagacaatatcaacacctttcatcacttggtttactcttctgtagtcacgtacatcgccgagcacaaatgacaatcttttttcatccgcatatttttgtttcatcacatattgtttactgtcatctttgctgaacacaatgacttctttaggtgttaagagcaaaaggcgttttacaatttggcttccgattgaccctgtcccgccggtaacgagaacagttttatcgtgaaaaaatggttttagctcaactgcttgctgtttaggcatggcttatcctccaactctcgtttctctaccatgcatcatatgttgaacaatttcagcgagttaatgaaagcaaccaataaatcaaaaattagagaaaatcattaatctgatgcgcttttatttcgctttacttgattaatagaaagtaaattactaacaaaacaatgtactaaatattcatttataattttgctcccgtccttttttcttccttcatcaaaaatttacacattcgacaattttcacaaaaacttaacactgacaatcatgtatgtattttacaattgaagtgcacgttcataaaaggaggaagtaaaatgaatcattcaaaaacacttttgttaaccgcggcggccggactgatgctcacatgcggtgcggtgtcttcccaggcaaagcataagctgtcagatccttatcattttaccgtgaatgcggcggcggaaacggaaccggttgatacggccggtgacgcggctgatgatcctgcgatttggctggaccccaagactcctcagaacagcaaattgattacaaccaataaaaaatcaggtttagtcgtttacagcctcgatggtaagatgcttcattcctataataccgggaagctgaacaatgtcgatatccgttatgattttccgttgaacggaaaaaaagtcgatatcgcggcagcatccaatcgctctgaaggaaaaaacgccattgagatttacgccattgacgggaaaaacggcacattgcaaagcataacagatccagaccatccgattgcatcagcaattaatgaggtatacggttttaccttataccacagtcaaaaaacaggaaaatattacgcgatggtgacaggaaaagagggtgaatttgaacaatacgaattaaaggcggacaaaaatggatacatatccggcaaaaaggtacgggcgtttaaaatgaattcccagacggaagggatggcagcagacgatgaatacggcaggctttatatcgcagaagaagatgaggccatttggaagttcagcgccgagccggacggcggcagtaacggaacggttatcgaccgtgccgacggcaggcatttaactcctgatattgaaggattgacgatttattacgctgctgacgggaaaggctatctgatggcatcaagccagggaaacagcagctacgccatttatgacagacaaggaaagaacaaatatgttgcggattttcgcataacagacggtcctgaaacagacggcacaagcgatacagacggaattgacgttctgggtttcggactggggcctgaatatccgttcggtatttttgtcgcacaggacggtgaaaatatagatcacggccaaaaggccaatcaaaattttaaaatcgtgccgtgggaaagaattgctgatcaaatcggcttccgcccgctggcaaataaacaggttgacccgagaaaactgaccgacagaagcggaaaataaacatgcaaaaagcagcttatacaagctgctttttgcatgtgaagaacgtttcatgagaaagttttggaacggatagccgtgagcacagccggaatccggtcgtacgtgtaagccggcactgtctcttgataattaagcgccgcgatttgttcacgttcacgtgggtttgtcatataaaaatggatcttttccgcaaaatccgcaagcccgctgtaagaaacaaaggatgaaaaagggggcgcgggagaaaggtctgtcagctgaaatgcctgacaagccgcaatgtcaaagcttctcgtatttaaactgatatttcggatgccgctcctattttgattgagcgcaaaccgataagaacggtgcgggttcaaaaccacatctgcgctgttgtaatgcaatgcggcatgttcgggttcaatccattcatccatgatgagcacattttgctgtctggcgatttttttaggcagatgtctgcgccatcccttcccgatgatccgaagcgtatacggaagcttcgccgctgctttcaccagttcaacccggttcgggtacgggtatccgatcagaagcaggtttgtgtgaagagaagcgtcagccgcttgttttgtaaaaatccgctgattaacgggaatcgggacataatatacgtgctgtaagcccatttgccgataagcatcaatagcgttttgttctatggtcaaaacggcatcggcgagcggggcgattgtcttgctcacatcgaaataaaaaggatcctccgtcaaccatagatagacgggaatctcttctgtcctcagccattgaagccattcagacggaatacggtcgcccgccatcatgagactgatgtcaggtttgaatgcccgtatactgcggattgaatcttcctgaagctcagaaacagaaaaaaagcggacggaagactgtaaaaagccttcctcgacccagcggtcaaaatacgtgtaaatgcctttatatcctgaacggatatataaaactttcatctgctttacgaagtgaacgtgacactttcaactttgtcaacgtcaagcaatgttgtagaagagcctgccggtgtaacggaattttcctgcgtcacataaacgatgccgtgaacttcgtcaaagaaaacaaattgaaccgggccgatcatgtctccagaatccatcacaatgctgatgacagtgccgggctgaactcttgcaaaaatccatctcgcggctagtgaaataccgcttcccagaacagattgagtgctgagactgtctttcgcagcagcttcatccacttttgcatcaattgcagattctaataaatcttttaccttgttttccacgttatctcctccatctgtgccgctagataaggcgctgttgtcaaatataggggccaaaagagttttcaatagcttctttttgagctctgaacgatcttcgctcatggggacatacacctcctttaacaatttcaacctcacgtttattcatattcctgattgatgagattggtataagtcgaatgccgttttgccggatttttttcatatttaagaaaacagctgaattttagaatcaggctttgtttgcctatgcggattagaaaagtgcgacatacgttgtatagattaaaaaatgaaggagaggaattattttggattcagaagaaactgtaaagcacgggggttttgaggaggaatttcatctcttactgctgcttcttcttttgttatcacgccagccgtccggagatcaatcagatatacggcgccaacttgtgatggcaaaagagcttggagttcctgtatcacgggtcaatctgattaacggcagcacactgcaaaacgtgattgtcaaagaagtgctgtctgatttggccgtttttcaaaatccgcttaataatacgagatcaaatgtggcgatttcaagcatcgtcagctggggtgctttttaataacagatatcaggctctgtctctttcggagccgttttttatgtgaacagaaggggggatggcggtggaaaagaaggtctcaattatcttaacgagctataacaaaccggatcttgttacacaggcgattgaaagtgttttgcatcagacctacagcaattgggagctgtttgtaatggatgatcattcaaatgaagaaacctcggccgctatcagcccgtatataaaagatcaccgcatatactattacaacagttttatcaaaccggccgaccggctgaaatcgacccggtatgccgttttgattaataatgcgctttcacaggcctcaggcgaatacattacttatctgacagacgacaccgtatttcatccggataggctcagcctcatggcggaagcgcttaatcaatgcgcggaatttgatgccgtctattccagtcagaaggtgatacatgtaaacgagcgcggaacagaacaatcccacttctatcgttttgctgatgacgtgcttgatcaggccgcttttctcgttgatcactgttcagtgatgcaccggagatcattgcttcggcgtgtgaaggagaagttcggcagtttttgggacgaagatgtcatgcattggaaccatggagactctgttttttggagcaggctcaacacatttacatcatttctgccgataaaagaagtgttggatacaacctataaaacaccccactcatttcagaacacgtatcaatcgcttccgtcagtgctgattgacggggctttcgttaaggggacggatcagaaagtatatcagcttgaccgaaataaaagaaagcctgtaaacgagcgctggcgtccgttatatgaaggaagaaccgtcatcattcctgatccgtttttatttcaatacgaggaagacagctccgtcagtattccgaattttcagctcgttcgtgatcagtttcatgtctattttttagaagacggggtgaaaaggctggttgattctggcgcatttcgcttttaccaatttaaacggcatgacattctggctttagaacgggacgaaatacaagcgctgccggacggtccgccgatcagctgggagagatcgggctgtattcagcaccttcccggtagaatgctgtttcgcattgaacgggaattttatgtttatttgagaggcgttctccatccgatcagtcatgatgtagtgaaacgcttttttgcaaagcagaaggcgatacccatttcctttcagcaaattaaacaattaccaattggaaagccgttctatccggtgtacgatgaaattataagaaatctcaatataacaaaaggatgagagatgcagttggatgtgtaaggaaaaggagagcttttatgaccgatcaatttgctaaaaccgagaaacaatatatagagcttacttctggcattcaggggtttgaacattacagtgtatgtacggaccctttgctgccgcagattttttcgcataactttgttcagctgcaccgtacatttccgttagacagactgctgccgttttttgcatccgttccgaacatgcttcaagccaattatattcatgtgaaagcggctcctgagcacacatttccgcttcttctgaaacaaacattggtaaagcagggctacgtagtggaagatgagctgttttttgcaaggaaactggaaaatggggatcggcaggccggacatccgcttaccgcttgggggacggaaaaaagcctcgctgacgggtcgtctattatgaagatttatgatgccctttacattggcgaggcggcggccgaacaaaagcttgagcggaaatatcctttgtataaggacgggacggttatgcttgtcgtgtgctatagcgacgcctcccgaacgattccgatcggctgcggagagcttttcatcaacaaagcggataaaaccgccaaaattgaagaagtcgcaattctggaccaattccaacgaaaaggctacgggtcaatattgatgaacgagctgatggctgcggcaaagctgaacggcatggaaaccgtatatcttgtgacgtccgggatggacggtgtaaaccgcttttatgaaaaactcggcttcaaaagatttcggcgtgtgcatacgatttttcattattttcttacatagatgggcattcgcataaaacaattgggagttggcccgcatacaatgccgtatatcggaagaagaaaggatgattcgtatgtacggatatgggggctgcggcagttatggcttcggttatgggtatggcggctgcggaggcggaaccagcacatttgtactgatcgtggtattgtttattttattaatcatcgtcggtgcggcttttatttgttagactgaaaaatcctatcatgaaaatcagcctgcagagaactttctgcaggctttttgttgttttcatttttaaaaaaagcaggttgaaaaacattttaatacacattatctttctggagaagggggcgaaaatgtgaaaataacgattgaagaattacctgaatcaagaattgcttattttcgacatgtcggggagtatggtgaaaagcaaaacaaagaactcatggagtcttttaaaaattgggcgcaattgaatggtctgcttgatcattcagccattttaggaatacctcaagatcatccccatcgtacacctaaagaaaaatgccgctatgatgtttgtgttgttgtcaagcaagattttcatgtgcctgaaccggctcggatcggtacattttccggagggaagtacgctgttttcttgcttgatcatgcagaagaggcagtcagtggattttggaacactgttttttctgagatcgaaaaaaataatctgtcaatcagagaacagcccataatcgaaagatatactttacaaaagatgaatcatcatttgtgtgaaatattgattcccatacagtaaagaagacggaaatgtcccgcctttctgttgatgcacgtcagacctgaagcgtctttttcaaaggattattttatcgagattgaaaggttgctcatggcaattacaacatacagcatacctcgataatattcttttttcttaaaacagctaatgccgattccgatcaaaatggtaatgagtataagctgtacagacaaatataatagtgaattcgaactgatgacggaataaatgaataataggaaaagaatcaataaactgcagatttttaatattttcagcaaatgtacactcctttattaatactctcttacaatttatcataaagtagtctgtttggtaatattttcagaacgcttctccggcagtctgtttttcagaaaggttttttctgtaaaaaaactttctgaaggataagaatgccgttattcatctgttcatacaatgaagcaaatgggtttttgaggtggaaagatatggggagctatttaattaaaccggagcttgacgggatttatccgacagtcagccatggaaaaggatcatatgtatatgatctggggggaaacaagtatctagacgggtcatcaggagcggtcacttgcaatatcggccacgggacggaggatattatacaagctttaaaagagcagcttgactctgtttcgtttgtgtatcgctcgcaattcaccagtgaacccgcagaggagctggctttatttctggccgatcatctgccgggcggactgaactggtcattttttgtaaacagcggctcagaggcagtcgaaacagcgatgaaaatggccattcaatattggcaggaaaaaggccaataccaaaaatccgtctttttatcgagatggagcagttaccacggtattactttgggagcgctttcattatcggggttttatgaacggagataccgcttcacccagctgctcgagcggtttccagccgtttcagcgccaaatatgtatcgttctgagctgcagggagaggaatttgtgaaagctgcggcagctgaactggaaacggctgttaatcggatcggtgcttcatttatcgcgggttttgtcgcagaaccgattgtcggggccgccggggcggccatcactccgccgccaggttattatgaagcgcttgaggatgtctgccgccggcacagtattttgtttatcgcagatgaagtcatgacggggctcgggagaacagggcgaatgcttgcatctgagcattgggggatcgtacctgatatcgcggtgctcggaaaaggattaggcgccggttacgctccgatcgcggcagccgtcgcgtctgatgacatcattgatacgatcaagcggggctccggagtcattatgagcggacatacgtacagcgccaatccatactgtgcaagagcggcgcttgaggtgcttcgctatgtcaaaaaacacgagctgcttcggcaggcagaggaaaaaggcgcgatactgatgcggaaattagaacaaatcaaagagcgcagcgggataatcggagatgtccgcggtaaaggcctgctgatcggggttgagttcgttaaagataaaacgacgaaggaagtttttccgaagaaacaggggttcacagaaaaaatgataaaagaagcaaaaaaacggggcctgcttatttatccttcaaagcccggtattgacagcggagaaggagacgccgtcatcatcgcgccgccgttcacgatttcgcatgctgagctggatgaactgtcagatctattttcacaggctgcagaagaagttgaaaaaatgatgaagagggattgagctgacatgtctatttttcataaacaaatcgatatccatgaagcaattgccgatgtcaatgacgaatctgtcatcatgttcggcggtttcgggggagtggggtcacctccgtcattaatcgaagcgattttagaaagcggcgttaaagagctgaccgtcatctgcaatgatgccggatttccggaaattggcatcggcccgcttatcgtgcacgggcgggtgaaaaggctgatcgcttcccatatcggctcaaaccctgtagccggcagacaaatgactgacggaacgcttgaggtggaattttcgcctcaagggacgcttgccgaacggattcgcgcaggcggagccgggcttggcggtattttaactgatatcggcattgataacgcaaccgtttgtgaaaacaaagaaaccgtaacgattgacggaaagccctatttagttgaaaaagcgctgacggctgatttcgcttttgtgtccgcacatactgctgatgaattcggaaatctgacgtatgacaaaacggcgcgcaacatgaaccctctgatggcggccgcggccgaaagaacttttgccgaggcggtaacgattgtgccggccggcgaacttgacagcgagcatattgtgacgccgggcgtttttgtagagggcgtcgtgcaaactgaaggagtgaagtggaaatgggcttgggaatagcggaaagagagagtatcgcgaagcgggccgccagtgaaatcacctcaggcatgatcgtcaacttggggatcggcattccttctttagtgccgaattttttgccggccggcatggaagtgatgctgcaggcggaaaacggcgtcctcgggataggcggaagtcccgagcgaggagcggaggatgagcttttatgcaatgcggccggatatcctgtcagtacggtaaagggagcttcctattttgattcaggtttgtcttttgccatgatcagaaaagggctgattgatattactattttaggcgcgctgcaggtcagccaaaccggagatctcgccaattggctcgtgccggggaaaaaagtgcccggaatgggaggggcaatggagctggcccaaggggcgaaaaaagtggttgtggtcatgagccacactgatcagaagggccggccgaaactggtcgaaagctgttcattgccgcttacggccgcgcgatgtgcagacctcatcattacagagaaagccgtaatcagcatcgatgataaggcttttgttcttgaggaactgctgaatggctcgaccatagacgatgtgattcaaacaacggatgctgaaatcagattgggagaatgttttcttaaaagggggcctgtccatggatcaattagaaaagaaagtcactgagtgggcggaagaaaacgcagcaaaagcggtaagcctgctgaaacggctgatcggggaaaaaagtatgttcggaaatgaatttaacgcacaggcagttgttttagaaaaattgagacagtttgacatggatattgatgtgtgggagccgagtattaaacaattgaaagaacatccttattttgtatcggaacgcgaagactttcatgaaagcccgaatatcaccgccgtaaagaaaggagccggcggaggaagatcactgatactgaacggacatattgatgttgtccctgaaggaaatcccgccgcgtggacgtatgaaccgtttaccgctgttgaaaaggacggcaaaatttacggacgcggttcaacggatatgaaaggcggcaatacagccctcttgttagcgttagaagcgcttgaagcttgcggcgttacgttaaaaggagatgttctgtttcaaagtgtcgtagatgaagagtgcggcggcgccggaacgctgtcggcagtaatgagaggctacaaggctgacggggcgcttattccggaaccgactaatttaaagctatttgttaagcagcaagggtcaatgtggttccgcattacggtaagaggattgtccgcacacggcggcacccgctatgaaggggtgagcgcgattgaaaaaagcctgcatgtcatcacggcccttaaagaactggaacacgtccgcaacgcccgcatcattgacccgctttaccgggatgttccgattccggttcccattaatatcggcaccgtccaaggaggaacgtggccatcttcggtagctgaccgggttgtgatagaaggcagatgcggaatagctccggatgaaacgcctgaggcagtaaaagaagagcttacaagctggctcaaagatttggagtaccgggatgaatggtttaaacaccatccggcggaaattgaatggtttggagctcagtggcttccgaatgatctcccggatgagcatccgctgatttccgctttggaatcttcttttgagaaaatgaaaggggcaaaaccgatccgtgaagcatccccgtggggaacagacggagggcttttgcaccatgcgggacagacgcctgtcatcgtcttcgggccgggagaagtcaaagcggctcaccaggcaaatgaatacattgaagtccgggcgttaatcgatgctgtcaaaatcatttctctttttatgatggaatggtgcggggtggcagatgggggtgacggagctgataaaggaactgagggctgaaagcggatcggccgagattgatgcagaccgtttcaatgagcggatcagggtcattcgttatgacgggcagctcgcgtcgctgattccggccgttttggcagaagcaaagcaagaagaagcccaaaaggtgattttctttgccaagcgcggcgatcagccggaacttgtcaagcatctctttattcatgagggggtcatagacggatattacaacgggcatgaggctgctgtgatggtgcgctatttatcagagaaacggagacagtcagattcatatgtatctgaagattctacggttgaccgtatttatgagacaccgcagcggggagtgactcagacagaaagcgggctgttgttcagaaaagcgggtgaaggtgatgcagaccgattatcgctcttatataaacatgtttttcagacctatccgactcctgtctttaatcccctctacattaaaaaaacaatgagagaaaacaccatctattttgccgcattcgatcaggagcgtctcatcggcgcggcaagcgcagatatcaatcccgtattggggcacgctgaaatgaccgattgcgcggttctgtcagattacagagggaattccgtaacggcacgcctgtttaaagccttagagcaggaactagcgggccagggaatcattcatcttttttccttggcccgtgcagcgtcttacgggatgaatgccgttttgtatcatgcgggatacggctacaggggcaggcttgtgaacaactgccggatttcagaagggctcgaaaatatgaatatatggtgcaagacattacgttttagccattcataaggaggaattcgtttgacaaacaaatggtttcagccgaagcgtcattggaaggagattgaattgtggaaagatgtgccggaagaaaagtggaatgattggctgtggcagctcacccatactgtaagaaccgtcgatgacctgaaaaaagtcattcatttgactgaagaggaagaagaaggcgtcagaatgtctgtaaaaacgattcccctgaacattacgccttattatgcttctttaatggaccccgacaacccgagatgtccgatccgcatgcagtccgtgccgctgtcagaagaaatgcacaaaacgaaatatgaccttgaagatccgctgtttgaagatgaagactcaccggtgcccggccttacgcaccgctatcccgaccgcgttctttttctggtgacaaatcaatgctcgatgtactgccgatactgcacccgcagacgcttttccggacagatcggaatgggtgtgccgaaaaaacagcttgatgcggcgatcgcttatatccgggaaacgcctgaaatacgtgactgcctgatttccggcggagacgggcttttaattaatgatcagattctggaatatattttgaaaaaccttcgtgacattccccaccttgaaattatccggatcggaacgagagcgcccgtcgtttttccgcagcggataacggataacctttgtcagattttgaaaaaatatcatccggtctggctgaacactcattttaatacgagcatcgaactgacggaagaatcggttgaggcgtgtgaaaagcttgtcaacgcaggtgttccggtcggtaaccaggccgttattttagcgggtattaatgattcggtgccgattatgaaaaagctcatgcatgatttagtgaaaatccgcgtccgcccgtactatatttatcaatgtgatttgtcggaggggatcgggcatttcagagcgcctgtatcaaaaggtctggagatcatcgaaggactgaggggacatacaacgggctttgccgttccgacctttgtcgtcgatgccccgggcggaggcggtaaaatcgccctgcagccgaactacttgctctcccagagtccggagaaagttgtgatcagaaactttgaaggggtgattacgtcttatcccgaaccggaaaactatatcccgaatcaggccgacgactatttcgaatctgtttttccgggaacgatggccaaacgcgagccggtcggactaagcgctattttcgcggacaaagaggtttctttcacaccggaaaatgtatcgagaatcaacagaaggaaagcgtttacatctaatcctgagcatgaaacgctgaaagaccgcagggaaaagagagatgaattgaaagaaaagaaatttatagcacagcaaaagaaagagcaaaaagaagaaacggaagtcggaggtgagtcgccgtgaagccatgcgaatggtgcagcaatcaaaaggcgtcagcttgtcaggcgactgtatactgggagcttcctgacggtacgagggctatagaaattaaagacacacccgcgttcgcctgttcatcctgcggcatgacttatcaggaggaagcggtcatcggcgaaattgaaaatcagctttttttagtcgacgcaaaaaaattaccggaaacactcacatatcaagagctgatgcagacagaacggatattgaaacggaattattttgacttctcctagttttcttttgttgtaatttcactcttgaaatgtataatagtacaacaaaagacagtcatcaggaggggaaacccatgaaatccttttaccactatttgatgaaatacaggcaccctaagccgaaggacgcgatcagccagtttgcgaaccaggcatacgaagatcacggttttccgaaaacgtcaagcgattatcacgagctcagttcttatttagaactgagcgccgactatttggaaacgatgtcgacatttgatgaagcttgggaaaaatatgagaccgaggtgcatcacgcctgacgtaaaaccgcacattgtgcggttttttctgttgaaaccgcccgctgacttaaggcggtgattgattgtgaggcgcagaatgatcaaatcctaaaaaacgcaccggtacgtcttccatttcggtcagcactgaaacgacggcacgtatcaaaatcaagccgtaaatggtatatttgaagtgaaaaacggtaaaattaccggaaccgtcagaggcggaaccgcagctgttttatatcccggcgatataacccgacagacctgtttctgcaagcggtgccctgtgtaaggagcttcttttcatgggaaataatcatacaatctaatgaagtgaggggaatcgaatgatccatcaggtggggcagatcatgctgtacgtcaataatcaggatgaggcactgacgttttggacggaaaaagcgggatttcatgtggttgccaaagaagataacggacaaggcatgaagtggattgaaattgcgccttcattgaaagccgaaacgagttttgttcttcatgataaacaaaccattgcaaaattgcagccggaattagaactccatactccttcgattatgttttttactgaagatcttgatcagttatatcaagatttttcaaatcagaatatcacagtcggtgatattgtcgacatgccttctggccgggtatttaactttgctgatcatgaaaacaattactttgccgttatggagaaaaaaacaaaaacctcttcaaaataggggatcatgcatcatttgaaactatttttaacagtacgtgaaaaaccgcacatgacttggtgcggtttttttgacttttgaacatgcgcagaaatggatatttcctgtggttttcatgcccatgcgaaataatggcggccggcatacgatagcgtatgacagtccgcggcaagggggagacagcatgaagcaaaataaaccgaaatttcaagtgggagatatcgtggtcgtcgtgatgtacggaaccgtcggcaccattacgaaggttcatcaaattgataaacattatctttacgaagtcaatcataatgaagtgctttatttcgaatcgtccatccagctttataaagattatgagggcgtgatcgtcgatatggaaaaattagatattgaatatgaatttctgatcggcgacgtagtatatgtaaaggactacggaaaggaattattccgtgtcatcggccacagaactgaaatatggagatatttagaggatggctgggaggacattatttatgagctgactcggctgaaagacggagagtggcttgaaacggaggaagaggatctcacgctggttctgagaaaatatgaaatggatcagtttgtgcatcagctgctgtttgtccactatgttggggaagcatctcatgagatcggcgaggataccgctgcgtctgctcttcttcagtttgaaggcgatgctgatgatcccgatacactgcatgtgctggcggtatcgatcgtagatgagctgcttgatatttataacgattataagatcctttatgaaatgttcggtgacgaagaatataaagatatgatgaattttgtgctggaaagcctcggggagcatttcagctagccggcaaaaaaacggacggtgacatataaaaaccagggcagacagccggcaaagatcacaaacgacattcctttcagcactttttccaatacgatatcaaatccatctccgtccaataaagccatcattttcgtcatcatcttttctccctccggggcttgtttttttaaaagtatatgagcggacaaaacgtttagaactttcgggtataatttgaagggttttttcataaaacataaaaaaggaggcggtgttagcatgaaagaaatagatcttgtgattgacacagaagagatagctgattttttttacagccagcttgcaatgcgcgggtacataccgagtgaagaggagatctttgaaatagccgacatcacctttgattatttattagaaaaatgtatgatagacgaagagcttgatgaagactgaaactgcggaaccgaagtgaaaaatgcttcggttttttcaatcggctcgggagaatgataaatggggggaaaacgttgtacaagccagcaagtcttttcgcattgtttattctgctcgcagcagcgatccggatagaagccgttcaggcttttgacgagcgggtgatagaagcggcggtcaggatcagggctgcctggctgaatgaattgatgctatggataacggagctcggcacgaccgcggtgcttttgccgcttcttcttttgacaggcgcggccctgtatatgtacaaaaaaacgccggatgttgtttttttgccgcttctttttctcattgaacgaattgtaaacattaaaataaaagaattgattgaaagagccagacccgcttttgagccgctcgtccatgaaacttcatacagttttccaagcggccactccatgaatgcggcagtgatatatcctgtcatcgcctggtttttgatcaagcatgttcctttttttacgaaaagaaagcgggctgtctccgtctttaccggaggtctcgtcctcctcatcgggttcagcagaatttatttgggcgcgcattttccgacggatgtccttgcgggattcagtctcggactatgcctcgtctcgctttttgcgctctttgacgaaaagtatcacccgtttcgacaaaaatagagacaggaaaaatgagaaaaaacgctaatactattaagaaataagagggagggatcttgatgctgttatcgctgcctgtgtttaaaaaaaagacttgtgcctatgatgtgacgatttttcaaacaccccgctacggtgagaaaaagggatacagggtcgtctatcggacagagctggccgctgacaatcatcaagacgcactggaaagggcattttctgtttttaatgtgcctgatacggttccaaacgactatcaagccagattcatagcgaccggagatgtcatactcatagacgaaggaagaaaaggaaagacctattacaggcttaaccctgcgggatggagcaaaattaaccgtctgctcgtccagccgaggtaaaacggggccggctgaatcttcagccggcttccgttttgtcttcaaaggcagttttaaggcttccgtttagcagcggaatgctcttttccgtgcgcttcatcagctgcaatcacgtctgaaacgggtacatgattgttctttttctggccggtcacccgattgcgctgttttttgcccatttatgctcactcctttttcttaggcttgtcttcccgccatattctgcccaagatcgccctgatcaatgctgatgattgtctcttaccgttattcagtgtacaatgggtgggagcttgaataggcaggaggaaaaggaaatgagtgtacatataaacgcagaaaaaggtcagattgcggatacagtgcttttgccgggagatccgctgagagcgaaatttattgcggaaacgtatcttgaaaatgtggaatgttataatgaagtcagaggaatgtacggatttacgggtacatttaacggcaaaaaagtatcagtgcaaggcaccggcatgggtgttccgtctatctctatctatgtgaatgaactgattcaaagctatgatgttcaaaacttaatcagagtcggttcatgcggagccatccgtaatgacgtgaaggtgcgtgacgtgattttggcgatgacgtcttcaacggattcacagatgaaccgtgtcgccttcggaagtgtagattatgctccttgcgcagacttcgaactgcttcataaagcgtatcaggaagcgcaaaaaaacaatcttcctgtagcggtcggaagcgtattcaccgccgatcagttttacaatgaagactctcaaattgaaaagcttgccagatacggcgttctcggcgtagaaatggaaacgactgctttatatacgcttgccgcaaaatacggcaaaaaagcgctgtctatcctgactgtaagcgatcacgtgttaacgggagaagagacaacggcagaagagcgtcaaaccacttttcatgatatgataaaattggcgctgcatactgtatcgtaaacttgggatgagggtcatgctgataaaagcagccctcttctttatgcatcgccctgattcaaaaatagaaaggtaagggtaaaatgaagaaatccactaaatggttctcgctcgctgctgctctcagcgtaactgcaatcgtgggaaccggctgcagcatttcaggcggcgacagccataaggacacaaaaacagcagccgaaacaaaacaatcagatgacacatctagcaaaaaaacaacgaagacagaagacagcgattttgtattggagagcaaatattttaatgatattaaagaagtgaacgggcttgagaccattcaaaacccggcaaatacacttgcgctcgtgaataagacatacacgctgccgggagaatataaaccgaatgatctcgtcatcccgaaagttgaattttctttcactgagaaaatcgagaaacgatatatccgcaaacctgccgccgatgctttggcggaactattcaacgcggggaaaaaagaaggctatgatcttgttgccgtttcaggataccgctcatatgacagacagaaagtgattttcgataatgaagtcagtctgaaaggtgaaaagaaggcgaaagaagcagttgcatatccgggacaaagcgaacatcagacggggcttgccatggacatttccagcaaaagcaacggatatgagctgaacgaagcgttcggaaacacggcagatggcaaatgggtgaaagaccatgcgtatgaatacggctttatcatccgctatcctaaaggcaaagaaaatgtgacaaagtatgagtatgaaccatggcatttgcgttatgtaggcaaaaaagcggcaaaagccatccatgaccatcaattaacgcttgaagaatactttaatgaagtaaagaaagtgtaataagaaaaagcccgcttgaaaaacagaaagcgggctttcttttattaccagaaaagtaaacctccaagcgcaaatccggtaattaaaccaagaccgataccgtaggctgctccccagcctccccagccccagtatccgtatccgtaacctctgtggcctccgtgaccgaccggggagatatacactttgctgcgtgttacccgtacgattctccctacatgcactctgccgtttcgttctgtaattcttgctacttttccatggtgctgtcggcaaatatgataatagttttgcatcttttctcctcctatcctatctaacctatctttctatgtcagcttatgatagagtgccataaaaaggttggacgaaaacaggaggacaactgccgatttacttgtaagcgacaaaagcgcagtgtcccatatactcactgtacgtctgcataagttcgtaatgagccgtcagcgtatcgtagtgggcaggctcgataacgggcgacaaatccatttctgtagtgggatcctgcgcattgttttcataggaagcgggaatgaattccgctttttgaaagccttgctgaagcaatctctgcttccatgccgcttcatcttgcaatacggtaaaaccgtagaagtcttttatctgcgtgatggcgtttttcggcaggggtttttttaaagctgcttcaatgccgattagcatgcccccgggtttaagaaccctcagtatttcagagagcgatgaatcaagatttgaaaaggtgagaactgattcagaaagaacggccgaaaattgattttccgcaaacggaagccgctcaagctccgccaaatagaccggaatggttaagtcttcagcggcaaatcgctttgctgctttttcaagcatgagggggtccttatcgacacaggtgacgggatacatcagatggccgagataagcggctgtctgtcccgttccgcagccggcgtcaaggatcggctcgccagaaggaggggccgcttttgtgagaacggatttagaaaaagcgagcccgccggggtgggctcctccgactccgaataaggacagcatttctaaatatttgctcaaagtccgaatcctcctttcttcctcagcatatgttgagagaaaagcataggtttgggtaaacgggaaagaagggcgcttcacgtttgaagttgacgaatgagcgttcgtctatgataataatgtaagaataaaaaggtggtgttttcttgaagcggcaatttaaactgttttttatcatattgatcactgcggtcgcagcctcggcgcttacgctgtttatcacgggcaatacgaccattttaggacaaggctcggctgctttgtcgaacagcaaatttgagaaattcaataaagcctacgagcagattaaaagtgattactaccaaaaaacagatgacagcaaattagtagacggagcgataaaaggtatgatcagttccttggatgatccgtattcttcttatatggacccgcaggaaggaaagtcgtttggagaaaccatttccgcttcgtttgaaggaatcggcgcacaagtggaagaaaaggacggcagcatcctgatcgtatcaccgatcaaagggtcgcctgcggaaaaagcgggaattaaaccgaatgaccagatcttgaaagtcgacggtaaaagcgtcaaaggccttaatgtaagcgaagccgtcgcgttaatccgcggcaaaaagggaacaaacgtcaagctcgtgctgcacagagcgggtgtcggcgatctgaacctgtcgatcaaacgtgacaccattccggtcgaaacggtgtactctgaaatgaaaaaaggcggcatcggcgaaatccaaatcacatccttctccgaatcgacggcaaaagagctgaattcagccattgacagcctcgaaaaacaaggggcgaaagggtatattttggatttaagaggcaacccgggcggactgatggatgaagccatcaaaatgagcaacatgtttatcgataaaggaaaaaatatcatgcaggttgaatataaggacggcacgaaagaggtcatgaaagcgacgaaagagcgcaaagtgacaaaaccgacagtcgttctcgtcaatgacggcaccgcgagcgccgcggaaatcatgtcggctgcgctgcatgaatcatcgggcatcccgctgatcggcgagaaaacgttcggaaaagggaccgtgcagacggcaaaagattacagtgacggatccaccgttaaactgacaatcgcaaaatggctgacagcggacggagaatggattcataaaaaaggcatcgaaccgcaatatcaagtcaagcttcctgattatgcaaacctgccttatttagatgcggaaaaaacgtatcaatacggagattccggaacgaccgtcacaaatgcgcaaaaaatgctggaggcgctgggatacagcgtgaatgtaaacggcacgtatgataaagcgtttgaacaagcggtcaaacaattccaagcaaaagagaaactgaaagaaacaggcattttaacaggagacacaacggcaaaattgatgacggacctgcaaaaacagcttgcagacaacgatacacaaatgaaaaaagccgttgaaacattaaataaagccatgaagaagtaaaaaaacacccagtgcgtctgtttgcgcattgggtgttttctgttcaagcaccacagcttacgtcgtttcttgttcaaataggtggctgttcgcctggatgaaaaactgtgattgttcgtagtgataggtgacttttgaaaagtcaaacggctggccgttggttaaatgaaaaatcgtttcaacgcaaagcttaggcgctcctgtaaacagccctaagtactccgcttcttcctcatttaacatccccgcgtacaagtataaatctgaaaaaccgcgcttcaatccgagaccatccctaatataatcaaaaattgaatctgacacaatctctttattcaaatacgtaataatcgatttgttataaaatgactcctcgatacataatgtcttcccgtcaatataccggattcgtttgacataatacacgtcgccgtcagacggcatattcagattttgcgcagcctcaggcgtgggctttctcacttccagcgctaataatgttgaggtgacattaaaatcttcaagtgattctttaaatccctgattagaaagcaggctgatatacccttttcttttattccgtctgacaaaaatgccgcttcctctcacttgaaacacaatcccctttttttctaataaatccaaggacttggtgatcgtgcttttgctcacgttaaactgagtcattaaagtttgcagcacaggcagtttatccccttgctgaagctgatgctcttctatatatttttcaatatccatcgcgatttgctggtattttaacatatacattcctcatttatttattgtcccgctatttcagaattatagcataatcgtttttaaaagccatttcgcaaaataagtataactgtttatgtattgaaaaattgtaccggtacaattataatgtgagtgtataatatgaaaagtaagggattgaattcttccaaacttgcaaagcggatgtgtgagctgccgcggaggactattcggcaaaacaagcggcggtcaaataaaggaggatatgaacgatgggaacattgccaaaagactttttatggggaggcgctctagccgcccatcaatttgaagggggatggaacaaaggcggcaaagggccgagtgtagtggacgtcatgacggcaggcgcgcatggtgtgccccggaaaataacagatacaattgaagagcgggaattttacccgaatcacgaagctatagatttttatcatcgttataaagaggacatcgcattattcagcgagctgggactaaaatgcttaagaacgtccatcggctggagcagaatttttcctagaggtgatgaaacagagcctaacgaggaaggacttgctttttacgaccgggtttttgacgaattgctgaagaatgggattgaaccggttatcacgttgtcacattttgagatgccgctgcatatcgcaagggaatacggcggattcagaaacagaaaaacggtcggattttttgtaaaattcgctgaagtgtgttttgaacgatacaaacataaagtgaagtattggatgacgtttaacgaaatcaacaacaagatggatgtgaataatccgatctttttatggacgaattcaggtgtcgccgtcaaagaaaacgaaaacgcaaaagaagtcatgtatcaggccggccatcacgaactccttgcaagcgcattggctgtttcgaagggaaaagaaatcaaccctgatttccggatcggcgcgatggtgtcacatgttccgatttatccgtactcttccaacccggatgatgtgatgctggctgaagaaacgatgagacagcgttttttcttcccggatgtgcaggtgcgcggatattatccaagctatgcgttaaaagagtttgaaagagaaggctatcagatacactttgaagacggtgatgaagagattttgaaaaacggcacggtggactatctcggattcagctattacatgtccacaaccgtaaaaagtgatgtgttaaacgataatacgggggatgtcgtaaacggaggattaccaaacggcgtggaaaacccctatattacagcgagtgattggggctgggcgattgacccgaccggtttacggtacacattaaaccgtttatacgaccgctatcagattccgttatttatagtggaaaacggattcggcgccattgatacggtagaagaggatggttccattcatgacacagcgagaattgaatatttagcgtcacatataaaagctttggaaaaagcagtcacatatgatggagtggatctaatgggctatacaccgtggggaattatcgatatcgtatcatttacaaccggagaaatgaaaaaacgctacggcatgatttatgttgaccgggataatgaaggcagcgggtcaatgaagcggtttaagaaagactcatttgaatggtataaaaaagtgattgaaacaaacggctcatatatattctaaatgtgtatgttaaaagagaaggcttcacgactgtgtgaagccgccctttttatcagtatttttgaaagcgcattcattttggtggaaaggaggtgactgtccggcttttcattctgaatcttttataaaacccaggaaggggatgatgaggttatgttttttaaaaaaggtctgtacatgacgctggcttttcttttgctttcttttttattatcaggcagcatggaaaccgaagtgtatgcgactgatcggaaagctccggacaaaaacaaagtaagggtgtggtacagttcggaaaaagatccggcttcccgtacatggtatgacggtccgaaagaagtgaaatacgccttagatgaacaaaccccactgactttgacaaaaaagaaggcttctgactccactgccgtgtatattgatccgtcgcaccgctatcaaagtgtattaggcataggatcatctctggaagaatccactatctctaatttatcgaaaatgtcgcccggaaaaagaaaagaagtgttgaaaaaactggttgatcccaatgaaggcatcggcatggacgtcatgcgcataacgatagggacatcagattttacggcccaggaattttatacgtatgacgatatgcctgaaggccgaaaagatcctaagctcagacatttctcgattcaaaaggatattgatttacacattacagcaaccatcaaggaagcgctggcgataaatccgaagctgaaaatcattgcctcaccgtggagcccgcccgcatggatgaaaacgaatgaaaatctcaagcgaggaaagctgaaagataaatatatcagcgagctggccgtttatttccgcaaatttattgaagcgtacgaaaagcaagggatcccgatttatgcgatgactcttcaaaatgaacctttgctggaaattgactatccgagcatgtatatgccgccgtctcagcagcgcaaactggcgcaggccttaaaaaaagaaatgaagaaacatttaattgacacgaaaatttggatttatgatcacaatgcaagcggggcgtggaactatattccgccgattttagatgataaaaaaggaaaccaggcggcagacggcattgcttttcatgattatgacggagacctttccgtcatgtcggaaatcggaaggcgatatcctgataaatctattcacttaacggagcggtctgtctgggggacagaaggagcggaccggatcgcgcagtatttccgcaacggcgcgtccagctacaatgcgtgggtgacgatgctcgacagtcaaattaagacgcatcattggataggcaccccggatccgacgctgtttattcaggacgctaaaaatcctgaccgctattggaatatcccgatctatcatatgacaggcaacttttcaaaatttgtcgaccgcggagcaaaacggatagaaagtaattacggctccaaaaacacagtttcgaacgtatcgtttcttaatcctgatcaatccattgtaacagtcgtgatcaaccagacatctgcggagcaaaaattccatgtcgtttcagaggatcggcagttcgaagccgttatcccggctaaaaccgtcgctacctacaaatggcagcacaaaaagtaaaaaaagccggcacatttacgtgccggcttctttctgttaagcgcctttttgattcattttatcagagggcgcttttccgaataaaccgtctttgacagcgtttgaagccgctttttttacaaaaaacgggttcaggatgataacggctgccatgttagcagtcaaaccccagaagccttcataaacaccgtgggccgattgggtgatgtttacggtgaatgtcacaataagaccgacgagaagtccgatgatggttgcttccttcgtctgatttttccaaaacagactgacggcgatagccggaaaaatctgaaccatgccggaaacaccgagaagctggagcgtaacgagcgccgtcgggaacagcatgccgaataatagcgcgagcccgatgacgacaaataccattgaacgggtgatgatcgtcagcttgctttgtgatacgttcggatgaatcaaatcccgatataagttattcgcaaataagtttgatgctccgatcgccatgatagagcagggaatcaaagacgcaagagcgatcgtggagtaagcaaagccctgagcgacccctccgtaagacatttggatcagcttcaataaagcgagccgtggattggtatcgtccggcaggacaagaaacgcgataaacccgagaaaaataacaagaatcaaaacaatattataaagcggcagaaacatgctgttcttgcggacggcatctgcgctttttgccgtgaatacgccagtcgccgcatgagcccacataaagagcgccagcgcagatacgatggaagcggtgataaaccaaggaattcctttcggccccgcggtaggaatcgtcagcatttgcggcgctttttccgccaacgtgtcaatcatcggcgtccagccgtgaaaatggatcagcgggagtgacacgaccataaacagcataatcacccacaccaggatgtctttaataatagccgtaaacgtcggccctttaattccgctgaaaaaggtatacagcgctacaagcataaaggaaatgataacgaccatattgacatttatgacacccgttccggccacctgaagcgtatcctgaatgccgctcagctggagacagatataaggaatgagcataagaacgccgacaatggcgacaagacttgccaaaagcttactgtcaaagcgctcacgggcgtaatcggcaagtgtcgttaatttgtggatttttgccactttccacagcttcggcaaaaagaaataagcaataaaatacgccaaaacagaatacgggattgcaaaaaaggcaacacttccccctgtataggcggtgctggtcaagcctaaaaacgtataagccgtataaaggtccgcaccgactaaaaaccagacgaggagccccccgaaccgtctgccgccgacagaccattcctcaacagaagtgcgtgatgatttgtctctcccggctataaagccgatgcagacaacagttaaaacgatgatggcagtaatgatcaatgctgttatatttgcgggcatcagtccaatcctccttgcttcttctgcagcctataaataagaaacgaacataaaggagtgactgcgatccataaaagcagccagaaatgaaaaaaaggcagcccgataatgatcggatgaacccgattagcgactgacagaaaggccagctggctgaaagggattaaaataagaatgaaaattagtgcttttctgaccatttactttcctcctgaaccctgataatgctccttatcatagcagttgtcagataagatcacaagatatttttcagaaaaaaaagaattctataatttttttaattaaaacactttagttgcaacaacattcatattaaattaaaataattaatatcttgaattcaagatatttaggagtgagtacaatgaatacacaaggattacaccatgttaccgcatttgcgaaagatcctgctgaaaatcttcggttttatactgaagtattgggcttgcggctcgttaagaaaaccgttaattttgatgacccggccacatatcatttttatttcggcaaccaaaacggagaaccgggcacgattattacatttttcccttttcagggaagccgcccgggaaccgtgggaaaaggacaggccggaagaatttatttctctgtgccgaaaggagcactcccgttttggcagcgccggcttgaagaaaacggcgtatctgtaatagaggagaccatgctgtctgaacaagttctcctctttgatgatacagaagatctgccgcttgccataatggaagatgaaagaagcggacagagtgaatggaccccttcgggaattactgaaaaagaagcgattacaggcatgagaggtgttcttctgtactcgtaccgtcctgaagcaaccattcaatttctgatggaacgcttcggttattccaagacaggagaagaaaatcagattgtcagactgcaatcggaggcacggatcggacatatcatagatgttgaccttgcaccgaaagaagcaggtgccggcggttacgggacagtgcatcatgtcgcattccgcaccaccaaaaaagagcaggcggaatggaaggacattcttgctgattctcatcttgcttcatctgacattcttgacaggtcttactttacatcaatctatttcagagaaagcggcggcattttatttgaaatggcaaccgatgaaccgggctttatgacggatgaatcctttgaaaatctcggaacagagctgaagcttccggaatggctggaagagcaccgcagtcaaattaccgccattctacccaaaatggtgaaaggagattgatctaatgaaacatgtgtttgaacagggaacgtcagaaaatgtcctgctgcttttgcacggaacggggggaaatgaacatgatctcctctcactcggacgttttatcgacccgaatgcaagtttgctcggggtcagaggatcagtgcttgaaaacggcatgccccgtttttttaagcggctgaaagaaggcgtatttgacgagaaagatttaattgaacggacggaagaattaaagaattttatcgatgaagcggcgcaaatgtacggatttagcagagaaaaagtgattgctgccggctattcaaacggcgccaacattgcagcgagtcttttgtttcattacaaagacgtactgaaaggagcgattctgcatcatcccatggtgccgattcgcggagtgaagctccctgatatggcagggcagcctgtttttatcggggcaggaaaacgggatccgctgtgtacaaaagaagaatcggaggagctttatcagtatctgacagatgctggtgcatccgtttctcttgtttggcaggagggcggccatcagctcacacagcaggaagccgagcaggcacgaatttggtacagtgagcgattcttataaaaaaaccttagtctgcataagcggactaaggtttttttcggcttacagccaagttgacacttgtgatacaggcaaccggttgcttttgtgcgccggtttaacggctttaccgattgaaatcagcatgacgggcacgaaacgttcactcacgtcgaattccttaacgaattgctctttattgaatccgccgatcgcgcaagtgtcatagccctttgctttagcagcaagcatcagctgcatcgctgctaaagaagcgtttaaaaatgctgaatcacgggcaaactgttcattttggtatgcgccgttaatctggcctaacagcgtctgtttaatctcttctgtgatattgccttgctcagccagttcagaataaacttcttcaccattttcgtttgcttttaagtcgcctaatacggcaatgactgctgatgaatcaataatctgtttttgattgaaagcaaccggtagcagggcggcttttgcttcatcactgtggaatacttggaaatgccaatgctgaaggttccaggcagatggggcttgcgtcgtaatgtccagaagttctgttaattcctcttttgtaatgaccgcatctttatcgtattctttaacggatgcgcgttcttttaaaacgtctaatacggatgtcatcatgtttcctccttcggataaacgtgttatcataatagaaaagttagaagcttactaaatgtaactcgggaactaattttaatggattacagaaaacttgtcaattcatagatgaagggatgaacttacgtgggatatacaatgtgtcctaaaatggaatccgctttttcgcttttgggaaagcgctggaacggccttattattcatgtactgatggacgggccgaaacgttttaaagatatgaccgaaaccataccgacgatcagccaaaaaatgctcgcggagcggctcaaagagctggaacaaaatgaaatcatcgagcgccaggtgctgcctgaaacacctgtcaaagtcatttacaagctgactgataaaggcatggccctgcaagccgtttttcaggaaatgcaaaaatgggcagacagtttttgcgagcccggggcatctgtcaaagacgaaacatgccatgaataacaaaggctgccaaaggcagccttttcttcataatatgatgttcactcttcgtaaaaaccgttgatataaaaaaatgtccagaaggaaatgattcccccggagaagattctttcctcaaaaccatgtttccagtacaactgaaatgctgtttcaatgaaaagataaggcgttgcagtaacaccaaatcttacgtcatagacctcgctatagccggactcaatcccgcagcaggagcagatatcgaatgtcattataaacaggacttttctttaatcctttacttccgcatacgaaacaaggatacatacaactcactagctaagccgggcggcgttttacaaacttccggttaaaaactgagcctccccaagcccaaagctccagtcggcgttcccgttttctgtaatggaaatcatgacgtcctcgggtgatatgccgcattctgtttcaagctgttcagccatcagtttatacaacgtttctttttgatgttcggtgcgggctttgctgacaatgctgatgatgacaaggtctttgcttcttttgaatccgagcccggtatcttcaatgatgagctcatggggcggatgctggtggacgatctgataacggtctgttacagggacgttaaacgctttaaccatggcgccatgggcggtatccagtaatttttttaatgctgcgtcatcccgtccctcaatgacgtcaaaacgaagtaatggcatatttttttcctcctgttggttttatattgtcgcagtttgtgaaaaaagtataacagttaatcaaaagatattcaaattataaccatgattttatatattgatgtaatggttgagagaacacatcgttttacaatcgcccaatcaatttcctcactttgtgaatacctttaagaataggcagacataaaggaggaaaaaacatgtaccctcgtcatgcattgtatcgcgggaatttcggacctgccggatttccggcgagaagtccttttttgttcggcgctcctttattcggcgggtttttaggcggccttctcggaggcgtgattgccacaggttttacgagaccccggtatccgtacggtttcgccggttacggatacggaggcgccccatacggcggtttcggtccgggagttggcggttatccgccattttattaaagaaaaaacggcccatatcgcgggccgttttttttatcttaaaatctccacttccgataaattgtagtcttcctgttttgaaaacatgacttcaatcatcccgtctttgtagactgcttttgttcctttccgtttgacgaggctcggaagaacgatttctttttttccctccgccagactgctgttctctacaacaaggctgtgtgacgtatgcttaatcctgatccggtcgagttcatcctgttcggcgggaattttcacaaaaacatgatctgatgtttcaaacatgtcaatttccggcttgggcggttctgcttcgaccggctcagctttcttcgacatcggatcacgaaaagggaattgcccggcataatcggcaccgaatacgctttccattactcggttgacataggtctcgacatctttcggatcagcatttttaaacgtttctttcgagaactgattttggaagggaaaatatctgttccaatcaaacacggcatctcaccctttcttaacggacaacatagtatatgcccgccggaagcttcccgtgatataatataatctgtttacagaaaggaaggggaaggccgtggaagggaataccgcaagaaaaggaatcatttataccgcttgttctttcgccatgtgggggctgtttccggtctattggaaacttcttgaacatatacccgcactggacattttagctcaccggattttatggtcgtttgtcttcatgtgcgtgcttttaactgttcttaagaagtggaaaaccggatggcgtgaactgcgtcttttgaaatctgaaggaggcctgctggcgctgttttttgcttccgttttaatttccgttaattggtttgtgtacatatgggccgtcaatcacggctttttgcttgaagcaagtctcgggtactatattaatccgcttgtttccgttcttttgggcatcctatttttaaaagaaaagctgaacaggatgcaagcggcggccgtttctattgccggggcggccgtcattatttctgcgtttcagtatggcgcggttccttatatcgcattgctgcttgcattcagcttcggcctttacggcttatgcaaaaaaagaacgcgcatgtccagtatgatcgggctgacgctggagacgcttctgattactccggctgcccttatttatttaggttatacagctgacgggaacgcttctgggtctttgggtgcaggaacatggacgctgctttttttcgcaggcgtatttacggccctgccgctgttaatgtttgcggagggggcaaagcgtctgccgctgtatcaagtcggcattttgcaatatatatcgccgaccatcacccttatgctcggcgtatttgtgtatcatgaaccgttttccggtcaaaaagcgtttacttttatttgtatatgggcggcattgctcttatttaccttttcacagataaaatggaaacggccgttaaaaagccgctaagcctttcgctttccagcggaagcgtaaattatgtataatcattacgagtatgtaaaggagctgtacaatgggcactgataaagacatagccaaagcttatcaagcactgtggaataaccgcacactcccggcttcaactcttgaagaagcggagaaggcaattgatcttgaactgcttgatcaaagaacacatccgaggctccggaagacgcccgaggaaaagtttgctctggcggtgcagcgaattgtagattcccggctgcagccgattgagaaatatgaattggttgaactacatacgaagcgtttgcaatttttacgagaagaaagaggggagcagctatgaaagcgatcataaaagaagatgtgcaaacttctttagaacgatatgccgatcgtcctgtatatatccatttggaaacaacgaccgggtcttattcagcgcatctgaatgagaaaaacatgacggttgtagcctatatacgcaatgccaaagtgacgtaccatcaggcgaaaatcaaaggaaacggcccgtaccgcgtcggtttgaaaacagaagagggctggatttatgcagaaggtttgactgaatatacagtggatgacgaaaaccgcctgttaatggcagggcatctgccgggcggtaaattggcgatttcgcttcaaatcagcgaaaaaccgtttacagtttaaagaaaagggtgaaaatcatgaaagaacatgtactcgtcatcctgcctcaccctgatgatgaatcatacggagtggcaggactgattgctttacacagacaaaaagatattcccgttacgtacgcatgcgcaacgcttggcgaaatgggccggaacatgggagatccctttttcgcgaaccgtgaaacactgccgctgttaagaaagcaagagctgattgacgcatgcaaggcaatggacgtcactgacctgagaatgctcgggcttcgtgataaaacacttgaatttgaagatgacgagtggctcgcggatatgatggaggagattatcgacgatgtaaaaccgagtctgattgtcacattctatcctggacacggcgtccatccggatcatgatgcatgcggcgaagcggtcatcagagcgctttacagaaagaaaaaagaagaccgcccgcgcacgctttgcatggcaattacccgtaacagggaggaagctgtcggcaaacctgatgttattcttgatattaaagaggtcgccgatattaaaatgaatgccttaaaagcacaccgcactcaaacggaaggcatgctgagagagctggaagaaaaaataaaaaataatgagccggttctccagacctggtttgaagaagaagtgtattggacatatccgtggaaagactgataaaaaaaggataaggcatttagccttatccttttttacgtcagatcggaagcgatcgcttcagcgagcgaagaccgtattgacaaatttgaaaaactaagtccgagctgcaccgcggtttgggcgatttcaggacggattccggataatgtcgctttcacgccgagcattccgagtgattcaattaaggtgaaaagctgttgggcaaccatcgtatcaatcatggccacgcctgataaatcaatgtacagctgtgttatccgcttctctgaacactggtgcagcgtattctccaagatcattttggcccttgccgtgtcaatatccccaatcagaggcagcagtccgacgttgtcaaaaagcacaatgacaggtgagctcagttcggtaatcaattctttttgagcttcaagctgaatgtttgtgtttttatacatctcctctatgaaaatatgaatgaccacatcaaatgatttaatcagcgtatggaatatatcttcggcatcttcctctgtcacggtgtctgaatgcagtctggtaaactgcttcacatggccgacatacaaatcacgaactctgataaactcgcgaatgatgtaatggataggagtttttaaatgttctttatcctgtgcggcttcgaacgcccacttttccaatgccgccgtataaacttctttttcctcagaaaaaatccgattgatttgataattaaacgccagattttgttttttcagattcgtgagcaccgccgggtcagaagaagcgtaaacagaatcaggatccgtatcatgaagggtatcaaaccatgtctgactgatgtcttctgcccgttcggttaaataatcgtacagcagtatatattttggcatgctgcgcctcctttatgaaatcatcatttttttcatataacgcttttgcagcttgagcagtctgaagaataaaccggcagctcctgcggcgagtcctgcaattaacccgatccaatagccgaatgccccgaggcttgtccaggtgccgactgcgtaaccgagaggaagcccgatgatccaataagaaacaaacgccgcaccgagtgtataattgacatccttatatcctctcagagcgccttgtatcggagctgctacggcatcagaaagctggaaaaagagtgcatagattaaaaaatgctgcgtcaaaatgagcacgtccgggtctgatgtatacattccggcgatctgcggtctgaacagcaaaatgaaagccgccgtgcataaagaaaaacaaagggccatcacaatcccgatatagctgtatgaacgggcatccctgtagcgttttgcgcctgcttcaaagccgaccaatatggtgagcgccatcgatacgctgagcggcagcatatacaacagggaagcaaaattcattgccgcctgatgggctgcaatcgtcaccgtctggaaatggctcatgagcagtgtgacagccgcaaaaatgctcgtttcaaaaaatacggcaaaaccgatcggcaacccgattttcaaaagctttctgcattctgacggagaaaaccggtacagcttccgaaatacagagtatccggcaaacggctcaaatctgcagacgataaaaaagctgatggcgcaaatacaccagtaagtcagggcggaggcaagacccgcaccgactccgcccaatgccggcatgttgaatttcccgaaaataaacacataattcaagacaaaattgataggcaatgagcagagcgtaataagcatagtgattctcgttttgccgagcgcatcaataaacgatcgcaaaacggcgtagacaaacaaaggaaaaatgccgagggataaaaatcctaaaaagtgtttggcgatcgtccggacatgcggttccaggcccaaatgtcccaaaatcaaatcaacagtcaaaaagccgataacgataactgccgcactgagaatggctgctacataaacggcctggatgacggaaaacggcgcttccttttgtctgccggctccaaacagctgcgatacaacgggcgtaacggccatcaatattcctgcaagccccgtataaaccggtgtccacaggcttgaaccgattgcaacgccggctaaatcagcggcgctcactttccctgacatcaccgtatccaaaaaggtaatcaaagaaagacccgcctgtgtaattaaaatcggaataaagatatgtaacagctgtctgaccttttggccgatcgtgtttgtttctctcaagttaggttccccgtttctttattttaacgagagaaattataacattttatgtataaaaagcaatgaggcccggtctactcttttttatccggtttcggccttttaaacatcttggcataaatgaatgaaagtgaaatgacccctaaaaaggtgcaaatatactgcatcagtcgtgcgaattccatatcaagtccgcctcctttcataattatcgtgcacactgcggcgcatatccatgcgcgcgatgcagaaaataagggaaaggagctgaagtgacatgcaacacattcaaatgtcggaaagtgcgtttaccgctgccgttcaaacgtatttgaaacaaattacggaggatgccgcaatgatactggggacattggatgaaaaagatcaatgccttctttgcgaactagatgaactgggacatacctttcaggaaatgcaggctattgcttcgtcattttacctgcagtcatatatcgaacattttacgccttcctatatagagctggcgaaagccgtgcagcatctggcagaagaaaagcatggggcgctgattgtgattgaacgtacagaaccgctggacggaatgatacaaaaagggacaagtctgcatgccgagatcagttcagctttaattgaaagtattttttatcccggcaatccgcttcacgacggagccgtattggtgagagaaaaccgtgtggtatcagcagccaatgtgcttccgctcacaacaaaaaatgttgatcttaaatacggaacgcgccacagggccgcgatggggctttcagccgtgactgatgcactcgtcctcgttgtttcagaagaaacgggaaaaatgtcctttgctaaagacggcggactgtatccgcttgtttcgccgcgggcgcttcacacgaaataataagaaaatgggaatattgtacctatttaatattaatgaagtgaacatctttacctttttctgtattgatgttatcgtttaaatatacataaaatttaaaagaatagggagtggaaagatggcaaatgtattgatgatcggttttccgggagaaggccatattaacccgtctttaggcgttgtaaaagaattaaaggcaaagggcgaacatgtcgtatattacggcgtgaaggaatatgagaacaaaatcgcggcaagcggagcggaattccgtgaatatgaggatttccggaaagatgaattcggaaaaaacgcaacgggtgatgaacagcgggacgctacagagtttttgctattaatgattgagacttctaaaaaagccgcactccgtattcttgaggaagtaaaagatgaatcctacgactacatcatgtatgatcatcattttctggcaggcaggctcgtgagaaacatgctgaaactgccggcatattcactttgcacgacatttgcaatgaatgaagcatttattaaagaggtcttctcaaatacaaaccttgtatcagaggaatcatcccattatccggcttataccgaagcggtcagcctgctcaatgaagaattcagcgcagacattaaaacgccgtatgatattttctcaaatgacggcagaaaaaccatcgtgtttacttcaagagcttttcagccgaaagaagaagagttcggtgattcttacctctttgtcggtccgtccataactgacagggcggccgctcatgattttccgtttgaacagcttgaaggagaaaacgtcctgtttatttcaatgggtacgatttttaacaaccagaaggaattgtttaataaatgcttaaaagcggtcagggactttaaaggaaaagtcgtcatgtcaatcggcaaacatcttgatccggcggagcttgatgaaatcccggcgaatgttattgtaaagccttatgttccgcagcttgagatcttaaagagagcggacttatttatcacgcacggcggaatgaacagtacgagcgaagggctttacttcaaaaccccgatgatcgtcattccgatgggcgctgatcagttcgccgtcggaagccaagtggaaaacacaggcgcgggcaagatgtttaaaaaagaaaatgtgacggcggaactgctcactgaagcaataaaagagttgagcgaaaaccctgaatatcagaaaaaagctgatgaaatcggagaatccctgaaagcggccgggggagcacagcgtgcagcagatttgatattggaagacgtaaaaactgccgagacccgggttctgtaatcagccatctcccgtttcctttataggaagcgggtttttttggttgtttttcgggaaggatttttcctgacacaaagagaattgtatgaaaaacagacaagaaaggtggaatgtcgcggaaaaaagccatgttatgaaaatgattccaaagtcttttgtgaaatcttctcaatttatgtaaaatgtgtggcattggtgatgatctaaggtcaaatgaaacagaaatgatgtcgacttctgaatgaattctgaataacagacggcgttcaaagaaaaggaacgtccctttcagcaatgataaataggaggtttttcgttatatgaagaaaaaaatcgcagccggtctggctgtatctgcagtaatgacttcaaccttcgccgtgcatcccgctgaagcaaaaaccatccaagtaaaaagcggcgactctctttggaagctttcccgacaatatcatacaagcatttcagccctccagacggaaaataaattgaaatctacaatacttcaccccggacagcggctgaatattcctgatggcagcacacataaaacggaccaaaaaggaaaaaaaagcacaggtgcttatacagttacatacggagattccttatgggtgatcgcaaaaaaataccgcatgagtgtttctgagctgagaagcctgaaccgtttgagttcagatgtcatctatccgggccaaaaactgaaagttaaaggttccgccggcagcacggacagaggcggcaaacagacaaagcctgataaaggcgcatcagggacttacactgtaaaaccgggtgactcgctgtggaaaatcgccaatcaaatcggcattacgatagctgaattgaaaaagctgaatcaattaacgtcagacatgctgtatccgaatcaagtattaaaaaccaaaggctcttcacataacggaaacagcggcgcaacaccgccatctcattcaaacccttctgagaagccatccacttacaaagtaaaaccaggcgattccctctggaaaattgccaatcggttcggcatcaccgcccagctcatcagagaaaaaaataaactgacaactgatgtgcttcaaatcggacaagttctggtgattaacgggacggaaaaaacagaagaccctgtgcgccagccggaaaacaaaccggccaagccaaacaaaccaaatactccggaacctccggtgacaggatcaaagattgacagaatgattggcgaagcgaaaaaatatgtcggcgtgccttaccgctgggggggcaatacgcctgcgggattcgattgcagcggctatatctattacctcttaaataaggtaggctccgtttcccgtctgagcacggccggatactggaatacaatgaaacatatcagccagccgtcagcaggcgacttcgtcttttttacgacatataaagcgggcccatctcacatgggaatttatttgggcggaggagatttcattcacgccagctcctccggggttgaagtttcaaacttaagcaatccatattggaaaaaagcttatttaggagcacgcagttatttttaaaaaaagcctttcggggctttttttgtttatcatttttacgttttgacaagactgatgggtaaaaataagggggagaatccatgaatcgtctcttgttttttctcatgctcgcatcaattacgctttgcggctgcgggggcggacccgctcctgttccgtccaaaaaacatggagaaagccgcgcattggaagcgtctgcataccgtgagcatgccggactcatcaatcaaaacggaaaaaatatcggttatattgaagtgaaagaatctgatgatgaagggtcagacattcatatatcagcgggacatctgccccccggcgcttctctcggatttcacatttatgaaaaaggggtgtgtcagacacctgatttcgaatcagccggcgggccgttcaaccctttgaataaagaacacggcttcaacaatccgatggggcatcacgccggagatcttcccaatcttgaagtgggtgccgacggtaaagtggatgtcattatgaatgcgccgcaaacttcgttaaaagaagggagcagactcagcctgcttgaccgggacgggagcgcgttcatcattcatgaacatacggacgattatttaacaaacccgagcggaaattccggagccagaatcgcctgcgctcctctgaaaaaaagcgcccgcagggaataagcccttttgtattgagaatacaagggcttttttagtatactcggttatggaatccaaatggaaaggaaacatcacctatgacttcagaattacagcacttatcactgccggaagatatacaaaacaaactgcaagcttatcaaaatcatcccgtttcccaagaatttcaggatttaatcggatcatcgggctatgaagccgaagataaagcgattatattcgatgcggtcatcgctttgacaatgggaaaaaatattctattaaaaggaccgacgggttcagggaaaacaaaattggcggaaacgctttcgaactattttcataaaccgatgcacagcgtcaactgctccgtagacctcgatgcagaagcgcttgtcggctataaaacgattgaaaatgaacagggccaggcgacaattgaattcgttcccggacctgtaacaaccgcaatgaacgagggacattttttatacattgacgaaatcaatatggcgaagcctgaaacccttccgattctgaacggcgtgcttgattacagaaaaatgatgacaaacccgtttacaggagaagtggttaaggcaaacgaaggattcggtgtcatcgccgctattaatgaaggatatgtcggcaccgtgccgctgaacgaagcccttaaaaaccgttttgtcattattgatgtgccgtatattaaaggaagccttctgaaacaggttctgacctctcaatctgttttaaaagatgataaattaattgagcggtttatgacattgtcttctgatttaatcgcacaagcgcataacggacaagtgtcagaggaagcggcgtccatcagggctctcattgatacgtgcgacttggctgcgtacattccgccgaaacgggcgattgaaagaggcattgtggaaaaacttgatgacgacagggaaaaagccgctgtcagaaatattgcagaaacgctgttcgaatgaggaatgtacaatgaagtttatcaaatttaacgacagcacgatcgattcgtttttgttcatgatgctgactgatctggccaaaacactgacccgaagcagtgaagtggaagtggaatacggcgtgcagtcttactacaatccctttgaaaagaaaatttatatgagccacttttggaaagacaggtcagccggggatatggaagccggcctgaaaagcgatgtgtatttgcgcgctgtcggcacacgcagcagctcattccgggaatttgccgggtttttaaatgacgttcaccggcgcttcaaccgccaaagctttgcaaagcagctgttcatgctgcttgaggatatcagaattgaagagctgatcaaaaaagagcggccggggacgaaacgtgtatttcagaagcggagggagatgtacaggaaacatttcacaacgcagctgacactgaatttagaacgaagcattttcactgacgctttgtactgcgcgatatttgtcaagctgacggcggagtctccgcttgaaggcattccttccatgcaggaagatattgatatgatgataccatatattgaacgccagctcatccgggtgtatgaggcggattctacgaaagagatcgcaagaataacagaagacctcatggaaggccttgatgaagtgctggagaaagatatgctgaacacatacttttttctgccggaacttgattatgagaaagcggctgaagagcctttattcgaaagcatcaaaagagcgccgtcattaagcgacgacatcacgctccctgagtcttccgacggagatgaagatatccatgaagagaaaatgaatacgtggcatcgggaaaccgaagcgccgtcgaaaagtttccttcaatttgatattgagcacggcgcgaaatcagatattgggaaaggcgccgccagagaaggggatgacggtgatcaggcgctcggctccgttcaaggctccgcacggcagacgaaaagagaggattactccaagcttgaggcgcttgaatccagacaggatgaacatgagggcgcggggcttgccgacggaaaagaaaacaagttcgctttcccggtttaccaaacgcctcataaagcatcgcccgaggaggagcagtcttataaagaacaggcgaaaacgatagaatcatatcaaaaacgcctgaagcagatgatacaaaagacacttgaacacaaaaaaacgctcccgcggaccgaccttcacgcgggccggctgaatcgcaagctgctccgctactttacagaacggaatccgcgtcttttctataaaaagcaagacccctcttcggaaattgacgccgtttttacgttgcttgtcgattgttcggccagcatgttcgacaaaatggatgaaacaaaaagagggattgttctattccatgaagccctgaaatcagtgtccgtcccgcaccaaatcgtcggattttgggaggatacaaacgaagcgaccgaaacgagccagccgaatttcttcaataccgtgattccgtttgaagagtcgctgctgcaggcggcgggaccgctgatcatgcagcttgcgccggaggaagataacagagacggatatgccatcagacaaatgacgaaacaactgatgcggcggagtgaggcgcaaaagtttttaatcgtgttttcagacggagagccggcggcattcggctacgagcaaaacggcatcgtcgatacgagcgaggctgtcatcgaagcgagaaaaagagggatagaagtcataaatgtttttctgtccaatactgcgatagaagaatcacagatgaaaaccattcaggatatgtacggaaagtacagtatttttgttccggatgtcgatcagctgcctgatgtgctgtatccgctcttgaaaaaactgcttcataaaagcataggataggctttttcctatgctttttcgctttttattttaaaatgatttaattttttcgttatggatctgttttttttactattttgtgaacaatcaaggtagaatccaaacgcaatcagtggtaaaatacccttggaagcgtttttattacataattttgggcacagcgttcaaaagttatttcaagatagtgaattgatcacttgattatctaggttgggggtaatattcaaatgtttcaaaataatatgaaacaaagaatgaattgggaagatttttacggaccgaacctcggctacgcactggagctgtacgaccaatatgctgaagatccagacagtattgatccggatctgaaagacatgtttgacgaactcggcgctccgccaagccaaataaaagaggcatcgggaacaaaggaacagggacgagtcaccgcagatctgattcaaaagatcgcagcagcagttaaacttgcagaagatattcgaacctatggccatctgaacgcttccgtcaatccgctcagaaaggatcaaaaaaagagcgagctctttccgttatccgagtacgggcttacagaagaagaaatgaaagcaatacccgcgtctgtcatttgtaaagacgcacctgccaatataacgaacggcttagaagccatccagcatttacgcaatacgtataaaagaaccatctccttcgaatttgaccatgtgcatgatttcgaagagcgggcatggattacaaaaatggtcgaatccggagaactgttccggaaaaattcaccggaaaaactgtcagccgttttagaaagactgacggaagtagaaggatttgaacaatttttacaccggacattcgtcggccagaagcgtttctcaattgagggattagacgcacttgtgcctgttcttgacgacattatcgcccagtctgtgaaagcaggcacaaccaatgtcaatatcgggatggcgcacaggggccgcttaaatgtcctcgcgcacgtgctcggcaaaccgtatgagattattttctcagaattccagcacgcgccgaataaagaccttgtaccgtctgaaggctcgaccggaatcagctacggctggacgggagacgtaaaataccacctcggtgcagacagacagttacaggatgctgaaaccaaaagcgcccggattacgcttgcaaataacccgagccatctggaattcatcaatccgattgttgaaggaagcacgcgggcggcacaggaaacaagaacgcaaaaggggtacccggttcaagacgaaacaaaatcgctcgccattttaattcacggtgacgcagcgttcccgggagaaggaattgtcgctgagacgctgaacttaagttctttgaaaggctatcaggtcggtggggccattcacatcatcgccaataatatgatcggcttcacaactgaaagcgatgaatcacgctctacgaaatatgccagtgatttggcgaagggttatgaaatcccgatcgttcacgtcaacgccgatgatcctgaagcgtgtctgtcagccgttaaatttgcggtggaataccggaagcggtttaataaagatttcttaatcgatttaatcgggtacagacggtacggccacaatgaaatggatgagccgtccacgacacagccgatgctgtatgacgccgtgagaaaacacccgactgtcaagcggatctttgcggaaaaactcgtaagtgaaggactgatcagcgaggaaaaagcgcaaaacattgaagcgacagtgacaaaacgaattgaagacgcctataaaaaggtgcccgccaaaaaagaagatgccgtacgggaaatcgaattgccggaaccggtatccaacggttttcctgacgttgacacagccattgattttgatgttctccgcaagctgaacggcgaactcatcaattggccggaatcctttaacgtgttcggcaagctgaaaagaatcttggaaagacgtgcaaaagcgtttgatgatgaccgtaaagtggaatggtcattggctgaatcgcttgcgtttgcttccattttgaaagacggcactccgatccggctgaccgggcaggactcagagcgcggaacgttcgctcaaagaaaccttgtgctgcatgacagcgaaacaggcaaagaatttgttgcactccatcatttagacgactgcgctgcttcatttgcggtgcataacagcccgctttctgaaggatcggttctcggttttgagtatggttacaacgtgtattcgcctgaaactcttgtgatgtgggaggcgcaatacggggactttgccaatgcggctcaagtctattttgatcaattcatatctgcaggacgggcaaaatggggacaaaaatcaggattagtcatgctgcttcctcacggttacgaaggacaggggcctgaacactccagcggacgcgtcgaacggttcctgcagctggcggcggaaaacaactggacggtggccaacctgacaagtgcggctcagtatttccatattttaagaagacaagcgaaaatgctgcttcgtgaagaaatccgtccgcttgtgatcatgacgccgaaaagcctgctccgcaacccgaatacggtatctgaagtacaggagctgagcgaaagcagattcaagcctgtctatgagcaatccggtctttcccacgcttacgaaaaagtgactcgcgttgtattatcaagcggaaaagtgtcaattgacatcagcgatcacttcaacaaaatggaaggcgataaggattggcttcatattgccagaatcgaacagctgtatccgttcccggcaaaagacgcgaaagagcttttcgccaaactgccgaacttgcaagagatcgtttgggttcaggaagagccgcagaacatgggggcatggagttatatcagcccgtatctgacggaaatcgcgccaaaaggagtaaatgttcaatacatcggccgaagaagacgatccagtcccgcagaaggagatccgactgtccacaaaaaagaacaggaacgcattgtatctgatagcttgactcgcaaaaactaagggggaaatgaaaaaatggcggaaattaaggtacctgaattagcagaatcaatctcagaaggaacgatagcccaatggttaaagcagcccggtgattatgtagaacagggtgagtacttgcttgaacttgagacggacaaagtaaatgttgaattgacagcagaagaatcgggtgttctaaaagaggtattgaaagattcgggtgataccgtccaagtaggagaaattatcggtaccattacagaaggcgctggcgaaagttctgcacctgccccttccgaaagtgctccagccaaagaacaaacgaaagaggaagcaaaagctgaaccggctgcacaagaagtcagccaggaagcacaatcagaagcgaaatccagaacggtagcgtctccggctgcacgcaagctggcaagggaaaaaggaattgatctttcacaaattccgacgggggacccgctcggccgcgtgcgcaaacaagacgtggaagcttatgaaaaaccggcttcaaaacctgcggcacagacgaaaccgcaggctcaaaaaacacagcaaagctttgacaaacctgttgaagtgcaaaaaatgtcccgccgcagacaaacgatcgcgaaacgattggttgaagtgcagcagacttctgcgatgctgacgacatttaacgaagtggacatgacggctgttatgaatttaagaaaacgccgtaaagaccaattccttgagcaaaacgaagtaaaactcggtttcatgtctttctttacaaaagccgtagtggcagctttgaaaaagtacccgctccttaacgctgaaattcaaggcgatgagctgatcgtgaaaaaattctatgacatcggtatcgccgttgcggctgaagaagggcttgtcgtcccagtcgtgcgtgacgctgatcgtctgacatttgccggcattgaaaaagagatcggcgaacttgcgaagaaagcacgaaacaataaattaacattaggtgagctgcaaggaggttccttcacgatcacaaacggaggtacattcggctcgcttatgtcaacaccaatcctaaacagccctcaggtcggaatcttaggtatgcacaaaattcagctgcgccctgtagcgatcgatgcagagcgttctgaaaaccgtccgatgatgtaccttgctttatcatatgatcacagaatcgtagatggtaaagaagcggtcggattccttgtcacaattaaaaacctgctggaagatccggaacagctgttattggaaggataatgtgagacagacaaaaagtacactgcccttatggagcggtgtacttttttatttgagagaagggaagatgtatatgaaaagctgttatccgcttgagattgaatttgagtataatgaagaattgcattctatcactccggttcttctgcaagacgaacatgacacggttttaatagactgcggatatcccggttttataaatcatcttcaaaatgctgctgcccggcatggattgtcgcttcagtcactgtcaaaaatcattgcaacacatcacgatatagaccatatcggctcactcgctgcactgcaccgtctgtacccgggtatcagcgtgacagcacatgaacatgaagcgccgtatattgacggatctaaaaaatcattacggcttgagcaggctgaatcaacgctttgttcattgccagaggaggcaaaaccttatgcaaaacagtttatccgctcgcttcaatcagtcgaagcggctcctgttcactggcaagtaactgacggcgagctgctgccttggtgcggaggcattcgcattgtagccacgccgggccatacacccggccatatcagcctttatctgcctgccgaaaaaacaatgatcgcaggtgatgcggtcgtcattgaagacggaaagctgaaccttgctaatccccgctatacgttacatatggatgatgcggtccgttccgtacagcgcctgcttgattacgatatccgtcaattgatttgttatcatggaggtgtgtttcaggggaatgtaaaaaaagcgctcctgcacctgcttcgtgacctgcagaaaaaacaaggataggggcggcagccgcctatccttgttcagttatgaaagcggaatctttacattttcatcctctcggtgctgtttttctcttttttctttgaccaataagtggcgagaattgatccagacagattgtgccatatgctgaaaatggcgctcggtacggctgaaaggggggaaaagtgcgctgttgcaagcgccgcgcccaatccggagttttgcattccgacttctatcgcaatcgctttttgcgaagcataatccattctgaacagctttgcacccaggaatcctaacaaatagccgattccgttatgtaggatgacgacggatacaatcagcagtcctgattgaagcaggtgctcacgatttacgctgacaacagaggaaacaatcgctacgatgccgattactgacacgagtggaagcgcgtgaacggcttgtccgacctgttttttgaagaacagcttcacaatcactccgaggacgatcggtaaaagcacggcctgcataattgaaacaaacagtgagccgaaagaaacagggagccactctttcgcaaacagcataataagtgccggcgttacaataggagcaagcaatgttgagatcgtggtgaccgcaaccgaaagcgccgtattgccttttgctaagaaggtcatgacatttgaggcggtgccgcccggacagcagccgaccagaatgacgcccgctgcaatttctgcgggcaggcggagcccgactgataaacagaaagccgtaagcggcataatcgtaaactgggcaatgactccgattacgacatgccaaggttttctgattaattctttaaaatcgtctgcttgaagagtaagccccataccaaacataataatacccagaaaaattgtcatataagaactgatccaagaaaacaaatcagggcaggcgaatcctaaaccagcaaagacgatcacccataagccgaaagtttgtcccgcaaacccgcttatttttttcaaccattccataaacacagctcctttttcatccaatcagtcaaaaaatgagactgacttttctgtattccattataaataatattctgaataattcaatattaaacattagttataaataatgatattatgtaaactaatatcttcttgactattcagacatatattcttacaattaatttttacactgaaatgaattgggagtgctgaagtgaaagaagctaatcaatggtcatctaagctgggatttattttagctacggccggctctgcaatcgggctcggcgcaatatggaagttcccttacgtagcgggaaccagcggaggcggcgcttttctgctcgtttttattttatttacgattttaatcggactgccgcttctgcttgctgaatttattatcggcagaaaaacacaaaaaaacgccgttgaatcctacaaggcgcttgcgccggggaaaaagtggcactggatcggatatctcggaatcattacgtgttttattctattatccttctacagcgtagtggggggatggatattaatctacattataaaaggctttacaggcggtttatcgctctcatccggatttgatacgttatttatcaacaccatttcaaacccttatgcagcggttttcggacagctgctgtttatcgtgatgacgattttagttgttgcaaaaggggtgagcagcggcatcgaaaaagtaagccaggtgcttatgccggctctgtttattctgtttattctcttaatgatccgctccgtttcgctccatgacgcagcgaaggggttaaaattcttcttcatgcctgattttggcgcgatggatgccaataccatattatacgcgatgggacagtcatttttctcgttaagcgtcggtgtgtccgtaatggttacatacagcgcctatttagaaaaaaaagaaaatattgttcaatccgcagtttcggtgacggtattaaatgttcttgttgccgtgatggcgggagtggcgatttttccggcggtgttttcattcggcctcaagccggatcaaggcccgcagcttttatttaacgtgcttccgaccatctttaaccaaatgccgttcggcatcgtgtttttactcgcctttttgctgctgtttttatttgcgacgctgacatcagcattttcaatgcttgagattttggttgccgttttgtcaaaaggcgattcggcaaaacgaaagcggtatgcatggctcggggggcttacaatatttattgtcggagtgccttcggcgctgtcatacggaattttgagtgatgtttccatttttcaccgcagtatttttgacgctgcggattttctggtcagcaatgtcttaatgccgctgggcgcgcttttaattgccgttttcgtaccgctgaaaattccgaaacaggcgctgtttgacgaactgaaaagcggttcaggcataaaacgaaaatggtttgcagtgtggctcctattaatccgttatgtgtctcctgtagccattattatcgtttttctgcacgtgctcggtattttttaaatcaaaagaagcaggcccccgttctaaacgggggcttttttaataaagcggccacatcacgcggtgcgcttgctcaaaccgtttctccgcctcacgccaatccacgacattccaccattgatccacgtaagccgcgcggtcgtttttatattgtaaataataagcgtgttcccacacatccaaagggagcaaagggatgatgtcccattgactgaaatgctgatgcttctcagcggccaaaatctccagccgtcccgagcgcggcgcccagacaaggatggcccagccgactccttcgacttttttcgctgcctgagaaaattgttctttaaaagcagaatagctgccgaatgacacatcaatcatttgaaagagagcgcccgtcggccgtctttttccgtttggattcatggaaaaccagaaaatactgtgcagataatggccggcgccgtgaaatgccaattgccgctcccaatgcgccactaagtcgtactgtttcgtctggcgcgcgtttttcagctcaagttcagctttattcaggccgtcaacatagctttgatggtgttttgtatggtgaagcttcataatctcccttgaaatatacggttccagggcggaataactgtaaggcagtttaggcagaacatgcttgccgatcggcacataggctctgcgctcctccggctcttccgattcggaaatgtcccggtaaagagctgatgcctgttcgtaccattccgcctccgttaatccatcatcctgaagggtgtgaaaaatccggtcgatttgtgccgcgaagcgatcgaaccgcccttgctgaatgacttgttccttcaaggtttcacaccaattcagcatctcggtttgataagcgtgccgtttcatttttcttcctccttttcactcactttcatgaaagtgctgagcgcaagcaaagaaaacacatacgggtagctgtgatacttgatgtaaaactgcttcggaaggccgattccagtcggataggtgaaatgagctccttcgtaatgccggttttcaataagaaacgatataccttttgtgacggcttggtgatgaggtttttcgtattgtagcaaagcttccgccgcccacgccgtctgtataaccgtcccgtaagaaagcgggacataggttttgatttctgcgcttttacaggattctccccagcttccgtcctcgttttgaatggacttcagccagcggatcgcttttttcacggccgggtggttatggctgacaccgcaagccttcatgcccgtcagcgccgcccatgttccgtaaatatagcagacaccccatctgccgtaccacgatccgtcctcctcttgatggcggatcagccattgaacggccttttcaacctggggatgatccgatgaaagccccgcttttcctaaacagtgcagcacccgtccagttaaatcgcttgttgaagggtcgatggcagcttcctcagccgattcaagcggcagcaggcggatcaggggatgatttacatttttctcaaaagcagagaagcccccgtcactgttttgcattgacaaaagccagctcagtccgcgctcccatgaggcgggataaagttttcgcgggatggctttaagcactgcggctgtgtcatcacaatcaggattattcgtgttgatgtttgaaaaaccccatcctcccggttctgcatgcgggttgtgaacggcccaatccgctactttcgtctgctgccgttcacgcaaaaatcgagcggcgctggtgatcatctgatcgttatctgagatgccgctttccataagcgcatagttaagaagcgctgtatcccaaacagttgacgttgaattttccagatacggtatattgccgcaagacgtgagtaaagctttcgtgccggcaagcgcctttctgataacgggggagtggcgtgatacaccgagagcgagcaggctgtacaccataaaaatagtggcgcttgcatagctgtacaatgtgccgtcttcttctatccggtcaagcatatacgttttggccgtacgcagaccaagctggtgaaaagcggcaggaatctgcaaaagccgcttccagtgtgcgaaaagagaagcgaggtctctgtcctctgcctgatcggaacgaagccatgtaaacggatttttggtcatatgctgatctaaatgctcgagagacggaacgtttgggtttttcagcgaaaatcttttgtttagcgtcacagccatcggaacaaaatgaatacgcgcgtatgtactgaactgataaaaatgcagcgggaaggatgggggaatcactaagaaagataatggcaggtgcagtgcgggccatggatataggccgtttgccgccagcatccactttgtcatgaagtgtacgttacgcaagccgccgtttgagatgataaagcgttcggcctgaatcatatgcgcttcagaacggttatataagccggaagccagcaagccgacatagccctgtacagtggcggtcacatttcctttccgttcatcaggatagttggcaaatgttccgtcagggcgctgcttcgcgcggatgccttcagcaagctcagcgatcagttctttatcattgtctccgagagaagtgaggaggaggatcagaaaggcgttagtcaaaatcggaccttcaaaacaaaatgaccatgagccgtccgcattttgcttttctcttaatagggagatggttttcctttggcggcttctgactttttcatgaatagtgctcacactcgctcaactccttcagaagcatatatattcatatgcaaatggcggcatgacaaaagaaagaaactgctggcaggcagcagtttcttgttttatcaatcaatcttccagactgatccagacgcttttcacttctgtataattatccagcgcataagagcccatttcccgtccgaggccggattgcttatagccgccgaaaggtgacgccgcatcaaaaacattgtagcagttgacccaaacggtgccggcctgtagacggtcagcaatgtaatgggcgtttttcacattctcggtccatagtccggctgcaaggccgtattccgagcggttcgcccgctcaataacttcatcaaccgtatcatacggaatggcggctaaaaccgggccgaaaatttcttctgttgcgatggtcatgctgtcatccacatccgcaaatacggtcggggagacaaaatacccttcttcaaacgggcagcttccgcctgtgacagctttggcgccttccgtttttcctttttcaatataagaaagcacgcgctcatgctgttcctggctgacgagcggcccgatttgggtatcctgatgaaggccggctccttgccgaagtgatttcgcatatgaaaccatttcgcttacgacttcatcatatttgtctttgtgaatgaagacacgggagcctgcacagcatacctgcccctgattaaacataaccccgtttaaagcgccgggaatggcttttttcaaattggcgtcaggtaaaatgatgttaggtgacttaccgccaagctccagcgttacgcgcttaatatttttcgcggctttctccatgatctttttgccgatttctgtagaaccggtaaaagcgagtttatcaacatcgtcatggttggtcagcgcttccccggctgtctcgccgaacccgggaacaatattgatgacgccgtcagggaagcccgcctgatctattaattccgctaaatagagggcggtcaggggtgtctgctctgccggtttcaaaacgattgtgcagcctgtggcaagggcggcgcccattttccacatcgccataaggagcgggaagttccaagggatgatttgccccacgacgccgacaggctcatggcgggtgtaattaaaatatgagccggcgaccgggatcgtttgtccggttatctttgtggaccacccggcataataacgcatatgctcgattgccagcgggatatctccattcgtcgtttcattaatcggttttccgttatcaagtgtttcaagctgcgcgagttcagttttgtgctcttccattaaatcggcaagcttatacatcagcctgcttctggaagcggccggcatagtgcgccattcgccgtgatcaaaggctttgcgtgcagctttcactgcgctgtcaatgtcttcagcctgtgcctcgtaaagcgtcatcaatgtttctccggttgccggattcggcgtgacaaatgttgctcctgaagcgctcggaacaaattttccgtcaatataaagcttcttcgtgccctgtaaaaatgtttccagcctttttgtgatctgcatcgttaaagaactcattcgtaacaaacctcccgaaattttttatggtctgttttgagcatcttgatgtccgcgcaaagtaagcgcatacagtcattctataatatagaccccggtaaaatcaattgataaccgttattgcaattcgcaggaaaaaacggctacaataagcttatcgatgaagaaaaggagttttacagatgattcataataattggcagacaaaagaaagcgtcaaaaaagtaaaatgcgtacatacagatgcgaaaaaatacattgtcaaaaacgtgctgacgcccggcaaagagtacgaagtcaaaaatgaaacagaagagttcatttttgtggtggacaatacaaataaagtcggcggtttctataaagagtattttgaagaagtctgaagctgaatgaatttattttcacagcttcagcgggtgtaatcaaaagaaggctgacactgcgatggatcaaatctcagatacctataaagaatgaacaatggtacggatctgcagaaaccgcggcattcagaagccgcggttttttaccgtgaaaagaaaaaactgacttttcgaaaaaaatatggttttcttgaaaccttttcatccgctgaaccgtattactacataacagagcacctttcgcgaaaaggcttatctaatgaacgttctaaaaatgtaatctgttcgtaatggtttaaatgccgcctatgtcgtattcttatatagggataaagaacttattttttatgattgtaataaaacaatagtatagaagcagaaagtggggttcttcattgggaattttttctgtcagcagatcaaccgacacaaaaaagctggaggctttgctcgttgagggagaacggatcgaaacgatttataaactgcgggttgaccaaatatgctttacaaataaacgagtgattttctttgataataaaatgttctccaaaaagaaagtgcgcgtcttccttccatataaaacaattgaaagcttcgccattcaagaagctgggatgtttgatcccgatacaggtcttgttttaatgacaagaggaaaaacattcgaattggaatttgcaaaagaaacggacttgaccgaggttcaagccatcttaacaaaatacttatgcagttaaatatgacataaaagccatccgaatgcaggcggatggcttttttattagataatgcttgtttttccggagttcgagtcaataagatccggatcagcaatagaactgatgggaatataaatcggtgccaaatcaccattttcttcaccgaatccgtagttgatcttattggataaaaaataatcgatttgctgataggggccgatcgtaatggaagaaccgcggtcggccgcattcactttaaagccccctacatttaccaaaaccggcgaaaacatcataatgggcctcctttcccggcgggaattttatcgcatgctgactcgaaggtagacggagaatcaatttgatccctgtcatccactttgccgttcgtgccaaaaaagccgctcgcatccccaaaattctgtccgtatccctgattctttttatcagaattctgccattctgccagtaaattttgtccgacattcaccgctgaagcattttcaaaggaattaattttcaacatgaaaatattaatattgatatatggagttggttgaaccacaggcaaacctcctttaatacaggtgtatgccggctgttatgaccgtatgcttaaacagggggcgataaaaatggacttcgacaagatgaagcaatggatggaaatggcgcaaaacatgtccggcggcgatttttggaaaaacgtttttgatgatgaacaattgaaatcatttcaaaacggccattctaactttccctttcaacagggagatgggcaaatgagaaagaatgaggatgcttttcctcttatagatattgtggaaacccatgatgagctccaatttttgctgtatttgcccggctaccggaaacaagatgttcagctgctgtcctacggagagtatattgtcgtaaaaggcacgagaaaatccttcttcaatgaacaggattttaaacagaagaccggaaaatacggcgatttcgaaaaaaaactcgaccttcctcattccgctcagggaacgaagggaatgcaggcggtgttcaaagacggaattttatatatatcaattgctaaacatctgggggatgcaagccaaatcattatcgaaggctgaccttattggcggtgctgtcgattagatctgtatcatcgatactcatgatagggataacgacaacggtgcaatctccgctttgttcaccgtacccttcatttcttttattaacggctgtgcgcctcagtatcacggaagaaccggtgttaaacgtcgctccgccgctgacaccgttcatttttatatgctcaaagttgataacggatggaaaaaacatcatgattcacctcctttttgtataccatgtttatatattcgtaatgcaggacgcatagaactttccaagagtgacggggaaagaagtgatttttcttgaaaaaaataatgaaagagcttttcaaaaaagtatgtgaagaagaactagacaggcttaagaaagtagagcaacagcttgatgagcttcaggataaatgtcatcctgagccgcaaacgattgaaggggaaaaaacatatgtccatatcgagcgcgtcaaagtggacaaagtcgtctacaacattgattttgaaaagctgaatataggagagctgagcggaatgctgaatatcggcgccacataccatacgccggagcatcagctcaaaaaagcctgccctgaagaatttcgggacaaccagcaaaatgatgctgcaaaagaagaaagacagacaaagcagccggccccgaatgtcacgatcagggggagaaagcactgatctccattgtttcagccgcctttttcgagggtatgtaataactgtgactctaggaatacagacgaaaaaggagatgctgaatatgtcattatcaaaagaacagcgggacagtctttatcataaattaatcgatttaaaggaaagtcttcagggagaatcaaaagaaaatcattcaatgagtgaagacacaggggaactgtcgaacggagtagataatcacttagctgatcacggaagcatttatttggacagggtcacgaatcagaccttggatgaagtcgatcagaatcttttagatgaagtgaacgacgccctcgagcgaatcgataaaggaacatacggaatatgcgaaaaaacgggaaaagaaattccgtatgaaaggcttgaagccgttccgtacgccagaatgactgtcgaagcgcagcgagaagcagagggagatgtgaaaacagacgctccgtcatatgaaagggatttccacgagcaggtgaaagacctctcaaataaagaaaccgttgatcaaaaaagctcacaaacttacgaaatcctggatcgcgagcaggattcacaataatatcagcaggtacattcacatgtacctgtttttttattccataaaaaaatctcggaatcgaaataaaaacgttgactttatataaaaaagaaagtaacatactatttgtaagtaaatattaaaagattaccgggaggaatttagaatgtctcaagtattatttgtaaaatcaagtgaccgtacggctgaagaaggcgtatccgtaaaattatacgaagcgtttttggctgcttataaagaaaacaatccgaatgatgaagtgatcgaacttgatcttcataatgaaaacattccttacctcggaagagatatgattaacggaacattcaaagcttcaaaaggaattgaaatgacagacgaagagaaaaaacaagcatcaactgctgacatttacttaaaccaattcgtcaaagctgacaaagttgtgtttgcattcccgctttggaacttcacagtgcctgctgtgcttcatacttatgttgattacctgtctcgcgcaggggttactttcacatacacgcctgaagggcctaaaggtttgatgggggataaaaaagtagcactcttaaatgcacgcggcggcgtatattctgaaggaccgatggcatctcttgaaatgtcattaaacttcatgaaaaccgttctcggcttctggggagttcaagatctgcacactgttgtcgttgaaggccataacgccgcaccggataacgctcaagcgatcattgaaaaaggactgcaagaagcgaaagatctggctgcaaaattctaatttccaaaaactcttgcgccctttagggtgtaagagttttttctattatatatagaagaaactggtgacaactttcgcagtgatcttatattgatatattgatattttgtcgaaaaaacaacttttatggagataaaagcattttttacacagaaaaaaggttttctgtaaaagaattaaccctcttgccaaaatacgactgatggtgtaggatataagagaagctacagtgttcgtattgttaattaagttttaacctttaagctgtaatagggagttttatatcggagccggaatgtcatgcctccattgcagaggacgacaggaacgcttctgcaaacacccactttgaggagtggtggtttaaaactttcttacttgcgtacggcatacgtagcgaaagccatttcccttgcggagatggctttttattttggaatgcctatgagcttaactctttatcagtatgataaaatgaaagaatcaaagacaaagtgaggttttacaacatatgctggataaagcccaatcccttctggcgcattattttggctacgacagtcttcgcgcgggccaaaagcaggcgatacaatcagttgcagaggagagaaaaaacacggtctgcattatgccgacggggggcggaaaatcaatctgctatcagattcccgcacttctgtttgaaggtaccactatcgttatttcccctcttatttccttaatgaaagatcaagtcgacgcgcttgaagaagcgggtatcgcggcagcttatattaacagcactcagacaagccgggacattcatgagcgactgaccggtttgaaagaaggggcttaccggctcttttacataacaccggagcgtttgacttctcctgaattcattcacatcctgcagaatattacggttcctcttgtcgccatagacgaagctcactgtatatcgcaatgggggcatgatttcaggccgagttaccggaatattgaaatcctttttaatgaattaaaagaacctcccgtcattatcgcgttaacggcgacggctacgcctgaggttcatgatgatatctgcaagcagcttcatattcataaagaacatactgtctataccggttttgccagagagaatttaacgttcaaagtagcaaagggcgaaaacaaagaccgttttatcgagcagtacctggacagaaataaacacgaagccggcattatatatgcagcgaccagaaaagaaaccgaccgtatatatgagaaattaaaacgcagcggcattaatgccggccgttatcacggcggattggcagatgatgacagaaaagagcagcaggagcggtttcttaacgatcagatacaagtaatggttgccacgtcagctttcggaatgggaatcgacaagagcaacatcagattcgttctccacgcacagattccaaaagatatggagagctattatcaggaagccggacgggccgggcgcgacggtctcgatagcgagtgcgtgctcttgttttctccgcaggatattatggtgcagcgctttttaatagaccaatcggcagccggagaagaaaaacaaaagcaggatctcaaaaaactgagacagatggtggattactgtcatacggaagattgcctgcagcggtttattctgaagtatttcggcgagagtgaggcagaagcttgcggagcatgcggcaattgcactgatacaaggacagcccatgacgtcacaaaagaagcgcagatggtattgtcatgtattatcagaatgaatgagcgtttcggaaaaacgatggtcgcacaggtgcttaacgggtcaaaaaataaaaaagtgctggaaaacggcttcagcagcctgtccacatacggcattatgaagcatcaaacaacaggggaaatcagtgattttatcgaattcctgatttcagatgaatatatcagaatggcggacggtacatttccgacgcttatggtcacacaaaaaggcagggatgttctgcttggaaagagcgcagtcgcgagaaaagaagccttagaggccgccgccgttaccgaaaacgatgaattatttgagattctccggcgtctccgcaaagagatcgcagcggaacaaggcgtgcctccatttgtcgtgttctcagatcagacgttaaaagaaatgtcggcgaaacttccgaaaacagatcatgatcttctttccgtaaaaggggtaggggaacaaaaaagattgaaatacggagcgctttttttagaagaaatccgaaattatgtaagagaaacagagtgaaaaaaagtttttttagagatttacacattatgttttccggtcgcaacggaaaaatcagaagcttgaaaacccttgctgtatcagggtttcagcaagacttaccaagcgagagaaatgtttcatgtaaaggaactgtaatctaaatcaaatcgttttgttattgaactgacattttcatatgttacgatatcacctgttagccgccaataaaaagctaacaagggaggatttacttatgaagaagacgattatgtcctttgtggcagttgcagcaatttcaacaactgcatttggagctcacgcttctgcaaaagaaatcacggtgcaaaagggtgatacgctctgggggatctcgcaaaaaaacggagtgaacctaaaggacctaaaagaatggaatcagttatcttctgatttaatcattgaaggagagaaactgactatttcttcagtagaaacaaccacatctgggcagtacacagtgaagcagggcgacagcctctggaaaattgctcagaaattcggaacatcagtcaacaatctgaaaagcttgaataacttgcaatcagatatcatttacgcaggcacaaccttaaaggtaaaaggtcaggctcaggctgcacagccggctcaagaagccagccagccgcaaactgaacaaaaaccagctgcagagacagcacagccaaaacaagaagctgtccaaaaagagcagcctaaacaagaacctgttcaagaacaacaacaacctaaacaagaagcgaaggctgtcgaagcaaaacagcagcctgttcaatcaaatacaaaccaacaagagcctaaaaagcagctgacaatgactgcaactgcttactctgctaacgacggcggcatttccggtgtaacggcaaccggagttgacttaaacaaaaaccctgatgcaaaagtcatcgcggtagacccaagtgtcattccgctgggctctaaggtttatgttgaaggttacggagtagcaacagcagcagatacaggcggcgcaattaaaggaaataaaattgacgtatttgttgcaaagaaaagtgacgctaacaactggggcgtcagaacagtaaatgttaaagtattagactagtttcatatagagagtgaaggacacaaggcaaaatgccttgtgttcttttttcttcccttttttgtctgtgtataatcgttatatgctgaaaaagaaaaagcgttcctcgaatatgatatggagacaatgattttgaaaacggcatctgaagggatgattcgaatggagccggaacttatatttttatggaatgccttcacagaatcaccgatatttcaagcaggtatatgcacagcttgcgccattgtgctggtcatcggattgtctatgccagctctgaggatgtttcaggcgcttgaaagagggaagggaaggcccgccgttattgaaaaggtgagacacaccggcgtaacgatgaatggcaggtgcgggcttgttctccttttagacatgaaaaatcaagacggaacgtatgataaacgcgaactggcacatgccgtgtgtcatgaagaaatcagccgtttttatgaaggagcgcccgtatgggtgatgccagcggctgacggccggttcaagatcgctccgcgcacgccggggcattaacacaaaaagacgggaaagcagccccgtcttcttgtgttaatgctggtcgatccatatccgtccgccttctgagccggcttctatcctgcatgttcctccgatcgggaatgtcatcagaggtgtggtatggccgaaatcagcatttgcgataacgggcatggacgacagttcttctttcgtacggatgacggcacgcagagcctcttcagacacatttgaagcatgctggaaccgtccgataacaattcctttcacggctgaaaaagcggggagatggatgagtgactgcaaatcccgatcaaacatatgaatgttagacatatgatcatcttctataaacagaattacttgttccatctcgggaaagtattccgtgccttgcagaagattcagggtgcataggtttcctccgatcagtgttccttccgcataaccggattgaatgacgagcggtcccggattccgataaaaacgtctgtcctcctggtccatataccatttgtcatcgctccactcggctgaaggcagtacttcatacggagtgtcagaagcacagcaggctaagaaagagtcaatcgtatagtccaatccttttttcatggcgaatgaagaaaaatgggggccagaatatgtaacaagcccggttttttgataaatcgaatggccgagggcggtaatatctgaatagccgcaaaggattttcgggtgccgcttgatgatttcataatcaagataacggagcagctgatttgattggaatccgccgagtgtcgtcaaaacggctttgatgtcaggatcagcgaaagcttcgtgcagatcccggacacgcgattcaatggatgatgaatcaaattcatttatttctttcgcatactctgaaaaagagacacaaaaacccagctcctccaattttgtctttgcggcatttatattttcttctgacatgacggacatgcttgttgccggagaaacaatacgaatgccgtcaccttttttcaatttttccgggtacaagaaaaaaccctcctcttatggttttatctattacaccatataaaagagggtttttctattgttttttacaggtcgacccatttaatgccgcctgattgcgtatcattgtcaatccagacatcaaactgatgcttctcataaaaatgaatgagtctgtcgacatgatcccaatcacgcttagcaatatcacccgtcactttcgggatattctgctctctggcgatatgttttaaaaacttcatgcagattgagccgtatccgtggtttggcgggcctttaatgtccccgatatgaatggcattttcataataggaagcgatcagtgaaaaacatcctcttcccaggtaggctgattcacaatcagtcagcataatcttacatgtttggccatcatcaatcgaggaaacaatgatccaatcgtcattgttcgattgatcaataccaagcactcgcgcgtctttagatacatctttcagattttcccgcatcctgaaaatctgaaattcaagcttatgaagttctttttccagctctttctggtctctttcttctgcagtaaacaaattcatactcctttcacagtgcaaaacatcttagtcaaacacaagtatccattgtagtaaatgatgtcttggtttgtaaatgggttttgcaaaaacttttcttagaaaagtctgccgtgtatatgtggattgacgtttttaaagccgccaggttagggaaaggaacagtgagcagcggaaaaaggaggaatctataatggcaattgactcactcatcggcaaattgaagtacgtgatgacggaatctcctgataaaatgctctccttatatgtaaacacggatatgagaaatccggaccagcaggggggagagtggaaaatcgccttaaaaaccggttttcggagattaaaggagtatctgtctgccagtgatccggaagaagaaaaatctctcgtccgcatcatggaacgtgtctatcaatatattgatgggctcggtaaagagatgccgcgaagtctcgtattttttgcatctggagaaggcggtatctgggagacgattgaattgcaggtgcctgttgaaacacggttttattgggaagaaacggctgttcttgaccaattagaacatcttcgtgaacaatatccgagcacggcttttattctcacacagcagaatgaagtgaagatcatagaaacagtactcggaaagattgagggtgtggagcattaccaatacgatgtcatcaatgaatcgtggaaaccgcaggatgtaagtgaaagttccgcatcgatggacgaagacgctgccaaagcccatgtcgaagaaaaccaaaaaaggctgtataaacgattggcttcaaaccttgatcaaaaggccgcatcacacaaatgggagcgtctcgtaatcgcgggggataaggaaacagccgatattctcgatcaccatatgaacaaaccgattgatagaatcatccaaaaaaatctgctgaatgaaaatgagcataaggtcatagaagaactgttaaaggaagcgtaataaaacgaaaggccgggtttcttaagacccggtctttttagggcttaagtttgtctaatttctgacgaagcgggcgaaaccgttgacatcaaagctgaattctcataccatttggatagtcagtaaaattgagagaggtcataagatgaaccagacagaaaacaaacctaaaagttataccggtatcgtgctgacattgaccgttctgatcaacgggttaattgcggtgctgttttttatgccgaaatcgggtgaggtcagcatagccaatattcatattctgccaatgttaaatgctatttttaacagctttacttttatctttttgctggcagcgctctttatgattaagcaaaaaaacattcaggcgcataaacgctttattttagcggcgtttacgacgactctgctgtttttgatctgctatgtcgtgtaccactcgatagctgagaacactttattcggcggtcacggcattattcgcggaatttatttctttattttgattacgcatatttgtctttccgccattatcgtgccgcttgcgctgtttacgctgatcagaggcttcagcatgcaggtggagcgtcacaaaaaaatcgccagatggacgatgccgctctggctgtatgtcagtctgacgggtgtcattgtatacttaatgatatcgccgtattattaaaaaaaccgtgctctgcgcggtttttttattgaaaaaaggcgccctcatacagggcgccttttactcttcaagcgtttcaagtgttgttacatttaaggattgttcaacggttttggtttttgcttttactttttctgcgtacgtgtaatcaccgtagcagtagggataacggaaattgtctttattccctccgcaagtgtataatttcggattctttttgacctgctgctcggagtattgttttgccagttcctcagtatgcgatcctccatgttcagccacaaaatcaatatagccgactcccatgttgtagctttgtataatcgtatccaaatctacgccttttttcttgcctgcttgatacatgagagtgaattgtttgattccctgtttgatactggtttgagggtttttaatttcatttcgctttaaacccagagattctgaagactgcatgggatcgtttcctcttccttttgactcctgatatatcatgccgagtaccagcgatgtatatttggtgagtcctttttcatccagctcgtcttctacgagcggtttgtaatctgtcagccgttcaagcacgatcggtttgacatcaaacggaagacttttgagcaattcattatttgaaaataacaggatgagaaagaaggaaaccatgacaaaaacacatatcatcataagacccgcggcagcgaaacagccttttttctttttctccactgtgtttcaccctcaatttcaggagcattatgactttttcattatgacacagataaccgcgcgaaaccaagcagaaacccgtatttgaaacataaatttaaaataacggttcttttgccaggcgcaggatgtatcagcatcaattgacatttggtataattgggctacttaaaaaaagaagggtgaggtatatgactgaatttcacgaatccggaaacaagaatgaccccgctgtcgatttagatgaggaaacattatttttggttgcccagacctttaaggcgctgtgtgatccgacaagaatcagaatcctccatttactgtcacagggtgagcacgcggtaaatgatatcgcagaaaagctgaatttgctgcagtccaccgtttctcatcagctgcgttttcttaaaaatctgcgcctcgtcaaatcacggagagaaggcacatccatttattattctcctgaggatgaacatgtgttagatgtgcttcagcaaatgattcaccatacgcggcacgattaaaaaacatccctgctttttagacagggatgtcagccgtactgaccgttattggtttggtctctgctcgtttttaaaacataaaaagagaatccgctgtaataaacagcaatgaaataaaagacactgatggtcagcggatctgcgccgaccgtttggctgtacgcctccggatgggtgaaatccgctgtgactcggtaaatttcaataacccgataaacaaacctcgagatgaataacgttaatagaataagttcaatccacagatgagtgcgaaaatacatttttccgcggcgtttttcaaaagaaaggttccgtttggcaaaaaggaccagaagccagccgcaaaaagttccgaatatcagatggccgtataaagccgggtgtgtgatgctgaaaaacgccagagcggcggccagcaatgaaaacaaaatcattcttgtataaagccagcggggcttcaaaggctgaaagccgacggaccgtttcacctttttatacagaaaaaaggcaatcattaagacagggcagatgctttgaagtgtgatatgcatggtgcggaactccccctccgttgagtagtgtatgcttatccggctggttttagtagtctgatttattcgcaggctgaaagcatcttttatcacagtatgcgcgtttctttttttggtataagagaagcgccgcgcctttatcaggatttaaacagaaagttcttgaaaaactaatggtattagttataataaaactaacactattagtttttagggggatattgatgagaatcttacaatacggaaccgtttggcaactgaccttttttcctgcgcttttcccggtgaattgttatttggttgaagaggaagaaggagtaaccctgattgacgccggactgcccaacagtcataaaggaatcaaacaagcattacagaagcttaagaaaccgctgaataacatcttactcacccacgcgcatggagatcacgtcggttcgcttgactcattatccgcggaatttccggatgcttccgtctatatttctgaacgggattctttcttgctgaaaggtgacactgctttatttgagcatgaagcacaaacgccgataaagggaggagtgccgaaacatattcagaccgagcctgatcatctgctgaaaggcggcgagcgggtcggatctttgcttgtcattcccgcccccgggcatacgccgggaagcctcgcttttaaagatctgagaaacgatatgctgatcgtcggagatgcttttcaagtacggggaggcctcgctgtttcaggtaagctgaaatggagatttccgtttccggcttttgctacatggaataaagaagaagctgtcaaaaccgcaagaacacttatctctcataaaccaagcattttggccgccgggcatggaaacgttctccacaatcccgctgatttgatggctgaggcggctgatgaagccgaacgcagcctgccgggaggccgatcataatgtcgccgagagtcggaatgagccttgacatgattatcggagcggcatcaaacattgctgacgaaaaagggcttaacgaagtgacgcttgcggcggtagcaaagtccttaaacgtaaaaccgccttccctttataattttgtcgatggtcttcatggaattaaaacagagctggccgtctccggtttaaccatgttatatgaaaaaatggcggcctcctcagcaggcctgtcaggtgaaacggctttgctcgctcttgctgatgcctatatccatttcgccgaagccaatcccggattatatgaagcgacatttcaaaaagtaaaagacggccgaattgagaagctgtccagcctgcttgtggatcttgttgtcaggcagctgacagcaaatggttatgcacgtcccgaaaacgcaatccatgccgcaagaggactgagaagccttcttcacggctttgccgtgctaagaaaacagagtgcatttgaattaacggaatcaattaaggaaagccggaagtttgccgttgttgcttttttaagaggtttacaaacgagtgaacaataataatattatgtaaactaatgaataaaacggattatccaaaaggagggacaaatggattcattacagcacctcatttgtgaacggcgcacgtattcacatatttttgattctcatactcactcctactgtcaaatgctctttccgcttgaaggacagctggacttggagacagaaagctgtgagattagattaaaaccggatcaaatgctgtatattccgcccgggcatgaacaccggttccgttctttggaacgaaatgaatgtctcgtacttgacatgccggcatattttttaaaaggatcatttgaacccggcgttatcaataagcttgattctttttgggcatcaattcggtttctgctgacagaagagacaaagcagcagtcggttcattcattgagtctgctcgcagaatatattgctgaaaagatgcaagaaagcgctgcgaatgattcaatcgcgtatatccgccgaaatctctcaaagacatttacaatcaaagagctcgccgcaatggaacattaccacccggcttattattccgactggtttaaaaggcagacggggaaaagccccaaagcttatattgccgagcttcggatgaagaaagcggagcaaatgcttattgaaacaaaagaccggctgacagacatcgggtatgaggtcggctttcaaaatttgtcttcctttaccagatggtttgtcagacataagggaataacgccgcgcgcttaccgaaacacctttcaaacggataaataaacccgaagatcggttaaataaactgcgtctttttttggtatcatgattgtaaaaaaaggagtttttgaaatggcagtcatggaagattttatcaagctcgatctcagaataggaacggtcgtaaaagcagaagtatttccggaagcaaagatgccggccataaagatgacaatagatttcggcgaagaaatcggtatgaagcaatcaagcgcccagattacaaaacggtatgaaccggatgatttgacgggcaggcaggtcaccgctgttgtcaactttccgcctcgccggattgccggatttaagtcagaagtactcgttctcggcggcatcccggaagaaggagacgtggttctgcttacgcccgagcagaccgtaccgaacggaacgaaaatcggataataaaaaaagacgtttgcagaagcaaacgtcttttgcgtattgaggcgatacaccacacgccacattcgtgtgtgccgcaagggcatgtgcatcggcttacacaattcagctcatcgctatatgaatatagcatgacgggtgcagaaatgcaagagaaattattgaaatgagggctgaattaccgcatgacctctcgtcagggcgtttaaattaggtcagattaagaagggattaaagggatatttctttgatatattggaacgaaaattcaagaagagttactttgaggaattggaaagcataattttgtgaacctggcaaggtatagctcattatgaacccgacccttggttaagtatatatacttaaataagcctataaacgatagttcaggctgaaccattgctttatccagaagtggagaacgaaacagagagacatcatgtagttctgtcggtcctcaaaatagaggaataagtgaagagctcgtcacattttgttaccaacgagcacatcatcaatgatcatgtgggtaaaacaatcaccacttttgtatagggattcttacaaaaaagtaaggtgagtgtaagataaccgcatttcttcacaataaagtattcattaagataagaactataaaaggagtaaggagtggtgaaaaatgaaaaaaatgaccgtttttattatagtattaagctgtctatcggttttcatgttaggaggctgcgctgaccgaggcgctgtactagaaagcgattattatgttcaaattcatggaaaggcggaaaaaaacgaaaacaaagacaattacgtttacaatttagaagggtataacgagaaaggtaagaaaaagttggtctctttctttgttgaaaagccttatcaagaaggggacattgtgcgtgtgccgaggagccatgacggatatactggggaacctgaagctattaaatccgataaactgccggaaaagatcaaagaccgatttaatctaaagaaataagaacaatctgaggtaagtaatgtttcgatcagctgaaacgaacaatgttcagtgcatgacaaagttgatcggaacgtttattcctatcagaatcaaccaccccaaattgggaggcgtaaaaggatggtaacatactttcgaacctaactcaatttgatttagtgctactgtccactcgtattgtggcaaagggtgcacgaatcgttcagtcagatatacccgaaagcaatgatggagtaacggaatgggatgccatatattgcgacaccgttcggtcagtaaaaacaaagtgcctcaaaatgtggatatgtgttctggtcacagaaacgaaggagggatttacgaatgggttcaaaagatgattactttaaaacagctattaagtcatactgcaagcggcgacaaaatatgtcatcacaaaaatcacatttttctaaccggattaataatgagcatacaagtattactcaaaatacttgccactcctatccaaagtagccattgtgctgcagtcagccatgaggcagttaggataaagagtccaatggcaattgatatataattgccggctcggttcagtttacgtttgcaatgaattttatatttggcatgagaaataaattgatagattttatctttcagctcatcgcttttttccttcatcttatcctctgtctcttttacttttcgataaagcatattattcatcgtctgcactcccatatcgccgttttgaaaattcagccatgattttttcttcatagccatctgagatgaactgtgcctgatcttcaacttgtaaatgtgctttttcttcaaaaccatcctgttcttcaccatcaaaacgataaagtttttgcagcagcctccagaatgtttcaatttcatcagttgtgaagtcatgaaacatatccgctaaaaaataggtggatttttctgtgcaggaaattaacgctttttttccttcaggggtaatttcagtattgattgaacgtttatccagtttgcttggcaaagtgtgaacatatccttttttcgcgaggcttgaaattaatttgttagcggtttgttttgttgtgcccagctttttggcgatattcataagtgtggtatcttccgtcggtaaatgggcaatagcaataagagtcatgtgctgtcgggaagtcaacgcttctaagtattcgtccccccgagtttgcaccttattgacaaccgaaaataatgatgcgtaactttgttgcataaaatgcagttccttcattagtaaattaatatccataagttatctccaatctaaattgtcaccttgttgacagttataatatacatcgaaatagaaaataagtcaacatggtgactaatagggatttacggtttgttttcacaggggagagggatgcaaaacccttggaaaagtttgaaggatactttattaggaaacaaagatatcacaggtaagagaaatagtagaggactcaaagctgaatccaaagtgagaaggtgtttgacatgcagaaagtgaactggtcagaacagtatgaatggttcaataaacaggatgaaaaagacgggcgtttgatggcgcttcttcgtcatgagctttcatatggtgagatcatacggttatacaagaaagggttttatttgaaatcaaaagaaggggatgtttctttaaataaggacgatatccggtgtatgtttgggattgaggagaaaaaggacggcatgtcttaatgaatgggaagagaagaactcttcccgcttttcgtggcaggtgttaatctttttccagcatagtattcagccattctcttaatgcagtcttttgtacataccgctttccgtttctggtaatgtgtggaatgtcggaagtgtcaggcacgatttgtttcgcttcttccttagtaacccctaaataatggccaatatagaagtgcagatctttttccttaataagaatttggtcagtgtgttcatgaggatcaggtgatttaaagttttttaatccgtctcctatgaaatatccggctaaagcgatgccgatgccggtaaagatatccatacagcaaacctccaataaaagttatcatgttttatacggtcaaatccgccgaaaagattcaccttcagtaagaccgggggagcttatttttgctttccgagcttttcgatctgcacctttccggagaagaaaacagcgcctccgcccatatccgccagccgatcgggggtgagcgaattgaccagctgttttttatcatccatgtcggcccaaagaccttggctgactgcaacgccgggaaggacttgttcgccgacggaagctgtcaattcacattcaccgcggtggttccaaactcttacagtttctccgtcttctatgtctaggcgggcagcatcttctgtatgaataaaaagctttggcgccttttccagttttacgtgtttttcattattcgaaaacgttgaatttaagaaattatgattcggtcccggaacaaatagaaacggaaaatcgtcatcgctcttcagaggaatgtgcgtcggcagcgccggataaccttcctgtttcatcttttcagaatataattcaatttttccgcttggtgtcttgagcttgcccgggaaaagcggttttttccgtttggctctcataaaggaatggcgtgagagcgaatcgtaatcaatatcctcgatatacgggttgtcggggcagtccagcgcctgtctgattaattcttcatcagaatcctgaagctcctgctcggtaaagcccatcgccccggcaagcaaacggaacacttctgtattcggtttgctgtctccatacggttcgatcaccggtttttgcagctgaataaagtgatgccagtaagacgtgtaaaaatccgtactttcaaaagcagatgcagcagggagcacaatatccgcatatttggcggtttccgttaaaaataaatcgtgaacgactgtaaataaatcctcccgcagcaggccttttctgactttattcgcttcaggggcaaccactgcgggattggtgccgtaaataaacagggagcgcacgggtggatttgtttctaaaagaacgcttccgagcctgttcatattaaatgatcttggctttctgccgtatagcagatcaggacgctggagcgcctgtctgttatagtttaataccgcactgttatgtttgattgcgcctcccccggtgttgagccactgtcctgttacagccggaagacaggcaacggtgcggacgatcattccgccgttgtcatgatgctgaatgccgtttccgatcctgataagggaaggggaagcttcaccgtacattctcgcaagacgtctgatatcgtcggctttaacgcctgtaataacagaaaccgtttccggatcatactgtttgacatgcgcttttaattcttcgctgccttcggtgtattctgtgagaaatgcttcatcgtgaaggttctcatcgaataagacatgcatgataccgagagcgagtgcggcatctgtgccgggacgaatgggaataaaccaatcggcaagccggccggtttgattcttatgtacatcgataacgacaattttagcgccttttttccgggctttttgagcaatcatgacctggtgcatatttgtgctgacagcattgattccccaaaaaataaagagctttgcatggatggtctcctcaggatcagtacccgcgccttctcccattgtatagttatagccttcagatccggctttgctgcagatcgtacgttctaggtgactcgccccgagacgatggaaaaaacggcgatccattccctctgccgcgagttttcccatattgccgtaaaagctgtacggaagaatgctttctgctccttcttcggcaatcagctctttccagcgcgcactgatcgtattgatcgcttcctcccaagaaataggcgcaaacttggcttcacctttttcaccgatccgttttaacggagcggttaaacgcttctcatcataaatgcgctcagccatgtgtctgactttgttgcatatgttccctgatgtgacaggatgatcggggtctccctgaattttaacgatttttccgtctgtttttgtcacaagcaaaccgcattgatcgggacagtccagtgagcacaccgacttaaagaccccgtttggctgttcagctgcagaattcatagcccatttctcctctttttttatattgtaagcattataacatttcaaaatcgaacgtcaattcagaaaaaagtgttgacatccaggaaagacttttctatgatgggtttattcttttaaacagcctgacaatttcatcattttattttctatcaagagaggtggagggactggccctatgaaacctcggcaacatttattgtgccaattccagcaagcgtacgcttgaaagataggaaagaatgatctatacatatttgtgcgcttcaagcggataaagacggtatatgaatctctttccttcttcggggaaagagatttttttgtgaaaaaatttatgtgaaaaggatgttttgcaccatgacggttttaattaccgcaccatatcacgacgaggggctgaaggagctgacagagctgttcggccggactgtgcacaggccgtggaagaagcacggccgggcttatcgggaagacgaattaattcggatgatccaagagacaaatgcggcgggccttattactgaacttgatgaggtatctgagcgtgtcattgacatattgccggattccgcttttatcggcgtctgcagagggatgccgtctaatgtggatattgaggcggcgactaaaagaaagattcctgttttctttacaccggcccgaaatgcccaggccgttgctgaactgtttatcggaaatgtgatttcatttttgcgtcatacgtattcttcccatcagtggctgaaggatgggaaatggaatggtgattatttgcaggcttacgtcaaattcagaggaaatgagctgacgggaaaaacagtcggtcttatcggtttcggagctgttggacagagaatcgcccggctattggccgcctttgactgtaaggtgctgtactatgacccatttgtcaatcatgaaaaccgggagtatgaaaaaacgacgatggaacgggtattttctgaaagtgatattgtttccgttcacttgccgcgcacagaagaaaccatcggccttatcggcgccaagcactttcaattgatgaaacaagaagctgtttttgtcaatacgtcaagagcggcggtaacagacagagaagagctgttgcgggtgctgaaagaacggcggattaaaggagcgatccttgatgtattttatcacgaaccgcctgaatcttctgattatgaaatcatttctttgccgaatgtgttagcgactccccatttagcgggggcaccatttgaagtggaggatcatcatgtgaggattttaaatgaagcgcttttcaaatggaaaaaagatcaaacctgctcaatacgtgaactttataacaaaagagaacttgaaacaaagggataggaaaaggaggaagctgtaatggctggacaaaaaggctaccttgtatttgacatcgggacggggaatgcgcgagtcgcggttgtgactgccggcggcgaagtgaccgcacttgaaagggaagacattgaatatgtgacagatccgctttatccagacggccgctatttctcgccggaaagaatatggacgaaaatcagcgcgatggcaaggacggttattgccaaaagtcctcatattacattaatcggaattacctcaacaagccagaggcagggagttgttctgatcaataaagataaaaaagcatttctcggtctgcccaatattgataacagagggcgcgaatgggaaagcggaattgagttaaaagatgaagtgcatcagcaaaccggacgtctcccgagcgctttattttccgcaatgaaacttgtcggattaaaagaaagacagccgtcattatggaaagaagtgacgtatatcacgagcatcagtgactgggtgacatttgagctaagcggaattttgagctatgagccgtcacaggctgccgaaacgctgctgtttgacgtaaggaaaaaagcgtggtcagaaaaattatgcaatatcttcggtgttccttcttccattctgccttcactcgtccgatccgggacggttgtcggaatgttaacgtttaagaaagctgcggttctcggtctttctgaaagagtgcctgtgattgcaggcgggggagacacacagcttgccatcaaaagtgcggatgcaaagccgggggatatcgtcatcatatccggcacgacaacgccgattacaaagataacggcagaggccggaactgaaagtttagagaaagcatggctgaattgccacacagaagaaggtcaatggcttcttgagacaaatccgggtgtaaccgggctcaattatcaaaaattaaaatccattttttatccgaatgaatcctacggcgtcatggaacgggaaatcgcaaagctgccgaaatatgatcatgcctgtgtttctgcgctaggctcctatttatcgcctgagaaaaacgcacttgcaaaaggcggatttatctttgacgccccgctgtctcaaaatttaagcagagcgcattttgtcaaagcagcactgctggaaattgctttttcaatcaaatggaactatgaggcgttaacagaggtaacttccttttcacagaatgatgtgaaagtatgcggcggcggtttccaaagtgatgcattgacacagtttcttgctaaccttctgcaaaagaagatttataagagagaaggcttcagtcaggcatccgtgatgggggcggcggtgatttgcaacgaggctctcggtgtgaaagaagagctttcgagtaacacaaaagttattgaaccggaatcggatcagacggatctcttcctatatgaagaatggaaacatacgcaaaggttatttacgcattttcagccggcggtgaaagcctgactcggggctgggatatatttctgaatgaattaatgacaacatgaaagtctgcagaggaggaacaaaaaatgcttaataaaataggaattccgaaacagcttacctgggggtttttgggagtggtgctgtttatgatgggagacggccttgagcaaggctggctcagtccgtttttagttgaaaacggcttgacggttcagcaatcagcgtccctgtttacggtttacggtatttctcttgcagcagcgtcttggttttcaggcgtctgcctcgaagccttcggggcaaagcggacgatgtttatggggctgttattttacgtcatcggaacagccgcgtttatcgcatacggatttgaatatcttaatttgccggtgatgtatgtcacgtattttattaaagggctggggtatccgctgtttgcctattcttttttgacttgggtgatttaccggtcgccgaaaaacaagctcagtacggcggtcggctggttctggattgcttattgctgcggcatgtttgtgtttggagcctggtattcaagctgggcgatcaaatcattcggctatttgaataccctttggagttcgattttctgggtatgcctcggcgcgttttttgcattgattttaaatagggaccgctttgaaaagaaaaaagcagataagcaggaaaaggcgcaggaattaatgaagggaatcaccattcttgctgaaaatccgcgtgtgctctcagggggtattattcggatcatcaacagcatcggaacatacggatttccggtatttctccccatgcatatggcacagcacggtatctctacaaatgtatggctgcagatatggggaacgatttttctaggcaatatcgtctttaacttaatattcggtgcagtcggcgatgcattcggctggaaaaagaccgtcatgtggttcggaggagtgggctgcggcatttttacccttttattatattacgctcctgttatatcacatgggaacttgcttttcgtcagcattatcggcttcatttggggaggccttcttgccgggttcgttccgattggagccattgtcccgacagcagctggccaagataagggggcggccatgtctgtattaaatctggctgccggcctgtcagcgtttgtcggcccggcgctggcttgggcatttatcggtcttgtcggcgcacaaggtgtcgtatggattttcgcggcattatattttgcaagtgcgatcttgacaaaccaaatcaaaatacctgaagagaaaacggcaaaagagaatcaaggtttgcctgaatacgcttcttaacagcaacgtcccgaagactcggggcgtttttttgacagctgctaaataaacttgtcaaagcgctgaatttgttcccgtaacgattgtttgttttcgtcaaattgtttgaaacgatgtccatttgcgccggacggatggggaaagccttctaaaatgaccgcatgattcatcctgccgttcttctttagcgtgcgacaggtggtttctgctgctttgccgagagggatgagcagaatatccttttttatcatttctatttcatccggaaaacatttcagcgcataacggctgaggagagccgacctgctgattgtcggccgatgtcccgtatagtttttgtgtttataaaaaacagggtgtttgataacagacgttgtatgaagcagctcccgtttcgtattgaataattgggatgaatcctcaaggtgaagtgcggccggctgaccgcattcattaagcatttcaatgatatgctgtctcattgaaccggaaaggccggccgctttttttgtctcatatgctatcgtctcaagagagccaccgctttttaaaagatgcgccgctgctttgtaagcccgctgcatctgagaaaaaccgggtgtgattccggaaatggcaatcactgcacgggggttgatatattcattatggggggaataaaacatgtccagatctccgtccttggctaaatggaaattcgcagtcagcaaatccgcctttgtaaatcctcccgaaaacgaaggtgatttaagcttctgcaaataaagcgaaagccgctcacggccgcatatcatgttacgcctccttgaatccgtcagttccttatagtgtcatcaaaaacggcggatgacatccaggctcatatatcgctttttccggcattccagagcattttcaggacgtggggcgttcctttgacttcggcagccgttgtttgcatggctgtttttttagtgagaaagtcttcctgcagttctttctgcttttgcgataacagctgggtttctgttttgatttcttcaacggacgtctgcatggacgctgccgtcccgttgatcttctttatatccggctttgtgtttcttttaaaacgcacggcggatacggctaaataaatcaatgcggcagctgctacggcagcactgatatacaagatgatgatcatctctttttcactcctttttctctgttgataccctttatggagagtgttgaatcgttttatttgctaattgttttttttctgcttataatgtgaaatcgtacataaggacattcagaaagggtgaaagacatggaaagcttacagaacaaaacggctcttatcacgggcgcaggcagaggaatcggacgcgccgccgctatcgctttagccaaagaaggagtcaatatcggtttaatcggccgcactgaagcaaatgtcgaaaaggttgcagaagaagtgaaagcccttggtgtaaaggcatccttcgctgctgccgatgtgaaaaaacaaaacgaggttgaacaagccgtctcctctattaaagaagaacttggtgagattgatattcttattaacaatgcaggaatcagcaaattcggcggatttttggatctcacgcctgaagagtgggaagacatcattcaagtcaatgtaatgggtgtataccatgtgacacgcgctgttcttcctgaaatgattgagagaaaatcaggagatatcattaatatttcttctacggcaggccaaagaggcgccgcggcgacaagcgcatacagcgcttcaaaatttgccgttctcggcctgactgaatctctcatgcaggaagtcagaaaacacaacatccgtgtcagcgcaatgactccgagcacggttgccagcgacatgtctattgaattaaatctgacagacggcaatccggaaaaagttatgcagcctgaggaccttgcagaatatatggtggctcaattgaaattacatccgcgcatttttatcaaaactgccggtttgtggtcaacaaatccttaaacaaaaggggacctgtcttcatgacgggtctttttttgttaccgcaaaccgaatgaacagacaaaagaagtgaaaaaggaaccgagatcagttataattaaactaaataaactatgtaccaaatgttcattaaatttattttccccgctgccaaaaaaacaaataaacatgagtcaaactgttcgcgcaataaaaggaaaaacgggatataaagagaatatttagtacatggaataatttgttagagggaagggcgtgcacatattgaaagaagaaaaaagaagttcaaccggttttttagtgaaacaaagggcttttttaaagctttacatgattacgatgacagagcaggaacggctttacggactgaagcttcttgaggtgctgcgctctgaatttaaacccatcggttttaagccgaatcataccgaggtgtaccgttcactccatgaacttttggatgacgggattttaaagcaggtaaaagtcaaaaaagaaggagccaaactccaggaagtcgttctctatcaatttaaagactatgaagctgcgaagctttataaaaagcagctgaaagttgagctcgaccgctgcaaaaagctgatagaaaaagccatttccgataatttttaaatccgtccggaacacatcggcctcccgggctcaaacggtgtgttctgtgtttcattatacataatgacaggcaggggacaatacatttaataaaacctcaaacttgacatcgagtcctgacatggtaacataaaaaacgtgtgaaaaatacgaacaaaatacgaacaagggagatgttaccgatctttgatcaaaagaaaattgcttttatcggagcaggatcaatggctgaaggaatgatatcaggcatggtccgagcaaaaaaaattcccaaccaaaatatctgcgtgacaaaccgccgcaatacagagcgtctcgctgaattggaacatcaatacggaattcaaggcgtgccttttgacagcatgaaaaccgaagacattgatgtttttattttagccatgaaaccgaaggatgctgcaatcgctctgacgacgctgaaacggcgtattcaaccccatcaaatcattctgtctgtcctggcaggcataacgacctcatttatacaacaatcattacatgatcgccagcctgttgtcagagtcatgccgaacacatccagcatgatcggcgaatcggcaacagctgcggctttcggagaccatgtctctcacagtgcagcaaaaaccgcggtatcccttctggaatgtctcggagaagtgtatgtgatcaaggaagaacagatggacattttcacaggcatcgcaggcagcggtccggcgtacttttattatttaatggagtttatcgaaaaagcaggtgaagatgcaggattagataaacggctgtcccgcaaaatcggcgcgcaaacgttattaggcgcagctaaaatgctgatggagacgggagaaaagccggatgtgctgcgggaaaacattacctctccaaacggcacgacggcagccggcctcgatgcgctcaggtcagaaggcggcggggaagcaatcgccaaagccattaaacacgcaaccgaacgttctattgagatcagtaaaacatttgaaaaaacagcagcactataaaagacaataacaggagtgatacagtgacgtctcggacagagatcaaaagagtcgcggtgaaaatcggcagcagctcactgacgagcctgcacggagaaatcagcagaagaaaactggaaactttggtggatcaaatcgcacagctgaaagacagaggctatgaagtgattttagtatcttccggggcggtggcggcaggttatcgaaaactcggatttattcagaaaccggaaagcctccctgagaaacaggcttctgcttccatcgggcagggattattaatggaggcctattcaaagctgtttttagcgcacggttatgtcgcgtcacaaattttaattacaagaagcgacttttccgatgaataccgctaccacaatgtccgcaatacgatgaacgtccttttggaacgaggcattattccgattattaatgaaaatgacaccgtcacagtcaaccggctgaaattcggtgataacgatacactcgcagcaaaggtggcaggtttaattgatgccgacatgcttgtgattttatcagacattgacggattatataatgataatccgcgcagcaacccgaaagcgcaaagaatccggcatgtaagtgacatcaccccggaaatagaagcaagcgcgggagatgccggaagtgagatgggaaccggcggaatgcgctcaaaactggatgcttttaaaattgtgatggcctccggtattaaaggctttctcgggcaggctaacgctccggacatactgctggaggcggtagaagaggcggctgaaggaacttattttgaagcggaaggaaccctgccgttaagccacaaagaacaatggcttgcatttaattccggccccgagggcgaaattgtaatggaaaaggaaagcagccgcgatgtagcgaacggaaatgtggcgctgtcaccgcaggacattgaacagattaagggcaaattcagcagcggggcggttgtcagactgcttgatcagcagggagaagagctcgggctcggcatcgtcaattattcctcggcccagctgatgacatttaaagaaacgccgcacaaacagaccgagcaatcggttattgatccagaagcgtttgtctgccacgttgaactgtccatcccgatcggctgacaaaattcaatataaacataaaaaagcccgaggcttcgttttgaagcccgggttttattgatattgttcaagtttggagaaaaattgaatgacaaaatgatagaaatcattcgcagatggagccagttctctgttttttggtctaataatgcctacggtgcgcttcacttgaggaaattcaatgggaattttgaccgtgaaccgaggtgtgatttctgcaaaagtgctttcaggtaatagagtaactcccatcccggcggagactaatcctttaatggcatctaaatcctcgccctccgttgatactagcggcgcaaagccggcttgtctgcaagcgtcaattgccatgttgcggagaataaatccttcaggaaataaaacaaattggtcaccgcgcagatcaattaaatggatatttttctgttttgcaagcggatgatgcagcggaacaagcgcgtaaatcttttccgtgaataagatattgcctgttatgtcgggaaattccgtcggaacggggccgagcagcgccgcatctatatccctgtttcttacggcttcaattaaaaacttataagatccttggcggagcaaaaactcgacattcgggtattcctctttaaatgccgaaatcaccgtcggtaatagctggctcgcaaggctcgtcggaaatcctattttgacggttccgcgattcgggtcaaggtattcatcgatttgttccttcgcgtaatcaattgctttcattgccgttttaacatgttctaaaaattgtttgccgatcggcgttaatttaatatttctgccttcccgttcaaataaagtgaccctcagctcttcttcaagatttgcaatctgcctgctgatggcggattgtgcgacatgcagatgatcagccgcttctgacacatgttcccgttctgctacctccataaaataccgaagctggcgtaattccattgcgtccacacccatctatctcattttgagatgtatttgatctaaattatatattgtttatattgttttgaaaacttacaattaatttaaagttgtcagattttatgaccgataattaacggaaactgatcgggggagaggaattatgacttacaatcaaatgccgaaagcacaaggtctctaccgtccggaatttgagcatgatgcatgcggaatcggcttgtatgcccatttaaaagggaaaccttcacatgacattgtcaaaaaaggactgcagatgctttgccagctggatcacagaggagggcagggcagtgacccgaatacgggtgacggcgccggcctgatggttcagatccctgatgctttttttaagacagagtgcggagaaatgaagctgccggaaaaaggccgttacggggtaggaatggtctttttctcgcaaaatgaagaagaaagaaaaaagatagaaaaacaggtgaatacattcattgagcaggaaggacagactgttctcggctggagaaccgtccctgttaatgtcggaaaaatcggaacagtggcacaaagtacttgcccgtatgttcgccaagtattcatcggtgccgcaaacgatttgcaggacagcctagcttttgaacgcaaactgtatgtcatccggaaacaggcggaaaattggggcgttcaagaacagcttgatttttacttcgcaagcctgtcaagccagactattgtttataaaggtttgttaacgcctgagcaggttgacgcgttttatttggatttgcaggatgagaatttcgtatctgcattttcactcgtgcattcacggttcagcacgaatacctttcctacctgggagcgggctcatccgaaccgctatctgatccataacggagaaatcaatacgctccggggcaatatcaattggatgagagcgagagagcagcaattcgtttcagaaagcttcggagacgatcttcataaagtgctgccgattttaaatgccgagggcagtgactcatccatccttgataacgcgtttgaatttttcgtgatggcagggcggaaaccggcacatacggcaatgatgctgattccggaaccatggacggaaaacactcacatgtctaaagcgaaacgggctttttatgaatatcacagctctttaatggagccgtgggacggaccgaccgccatttcgtttacggatggaaaacaaatcggcgccatccttgatcgtaacggcctgcgcccggcgcgttactatgtgacaaacgatgaccatattattttctcatctgaggtcggtgttattgaagtagagcaggagaacattcttcataaaaaacgcctggaacccgggaaaatgctccttattgacttagaggaaggccggattatttcagatgaagaagtgaaaacagaaatcgccaatgaattcccatatcaaaaatggcttgaagaagaattggttcaagtgaatcctgatccggaaattcgggaagaggaacaatttgatgatcttctcgtccgtcaaaaagcgttcggttatacgtatgaagatattcagaaatatttaattcctgttattaaagaaggcaaggacccgctcggctccatgggaaatgatgcgccgctcgccgttttatccgaccgcgcccaatcactgtttcattactttaaacagctgtttgcgcaagtcacaaacccgccgattgacgcgatccgcgagcagcttgtgacgtctacggtaacctggctgggagctgaaggcgatctgctgcatccgaatgaaagaaatgcacgccgcataaaactgtacactcctgtattatcaaatgaacagtttaatgcgctgaaaacacttgtgcatcctgatattaagagccagaacatccgcacgctgttttccgatgatcttgaaaaaggcctgaaggatctgtttcagcaggcggaaaaagcgatcaagcaaggtgtatctctgttaattttatctgacagagcaatgagtaaagaattgacgccgattccgccgcttttggctgtcagtgcgctgcatcagcatttgatccgccaaggcctgcgtacaaaagcaagcattatcgttgaatcaggcgaagcgcgtgaagttcatcactttgcggctctcatcggatatggggccgatgctgtcaacccgtatttgacttacgctacgtataagcaggaaatcgatgaaggccggctcgatattccgtatgaagaagctgtcagcaaatacggaaaaagtgtgacagaaggcgtcgtgaaagtgatgtcaaaaatggggatttcaactgtgcaaagttacagaggcgcgcaaatttttgaagcggtcggcattggtgaagatgtgatcgccaaatactttacagggactgcatcccagcttggcggaatcgatatcgaaaccatcgcgcaagaagcgaaacagcgtcatcaagcggcatataaggatgattacagccaaacgcttgagccgggaagtgaattccaatggcgaaacggaggggagcatcacgctttcaatccgaaaaccatccatactctgcaatgggcgtgccgcaagaatgattacagcctgtttaagcagtattctcatgcagcggatgaagaacgaataggatttttacgcaatctgttcgccttccaagaagaccgcaaacctttgaaattagaagaagttgaatcagctgcgtccatcgtgaaacgttttaaaacgggggcgatgtcattcggttcattaagcaaggaagcccacgaggctttggcgatagcgatgaaccggcttggcggtaaaagcaacagcggagaaggcggcgaagacccgaaacgttttgttccggatgaaaatggtgacgacagaagaagtgcgattaaacagatcgcatccggccgtttcggggtaaagagccattatctcgtcaatgcggatgaattgcagatcaaaatggcgcaaggagcgaagccgggagaaggcggccagcttccgggcaacaaagtatatccttgggtcgcggatgtccgcggttctacacctggcgtcgggctgatttcaccgcctcctcaccatgacatttattcaattgaagatctggcgcagctgatccatgatttgaaaaatgccaatcgaaacgcgcgaatcagtgtcaagctcgtatcaaaagccggcgtcggcacaattgcagccggtgtggcaaaaggcaccacagatgtcattgtcatcagcggatacgatggcggaacgggtgcttccccgaaaacgagtattaaacataccggcctcccgtgggagctgggtcttgcagaagctcatcaaacgctgatgctgaacggtttacgggatcgcgtggtattggaaacggacggtaagctgatgacagggcgcgatgtcgtgatggccgccttgctaggagcggaggaattcggctttgcgacagcgccgctcgtcgttctcggctgcgtcatgatgcgcgcctgccatttagatacatgtcctgtaggggtcgcgacgcaaaatccggagcttcgcaaaaaattcatgggcgatcctgaccatatcgtaaactacatgctgtttgtcgcggaagaagtgcgtgaatatatggcgcagttagggtttaaaacgcttgatgaaatgatcggccgtactgacgttcttcgtgtcagtgaacgtgcaaaagcgcattggaaagcggggcagcttgatttatccacgctgctgtatcagcctgaaggcattcgcactttccgcacggcgcaaaaccataaaatcgaccagtcgcttgatatgacggatattcttccggcagtgcaggctgcaattgaagccggtcaggaagcggaagctgaaatcaagatcaataatacaaatcgcgtagccggaaccgtgacgggaagcgaaatttctaaacgctacggagcggaaggactgccggatgatacgatcagacttcatttcacagggtcagcaggccagagtttcggggcatttgtccctaaagggatgacgcttcatttgaacggcgattcaaatgactacgtaggaaaagggctgtcaggcggaaaagttatcgtaaaagcacctgatgctttcaattgtgaaacacatgataacgttattatcgggaacgtcgccttttacggcgcaacgagcggagaagcttacattaacgggcgtgccggtgaacgttttgcagtccgcaacagcggtgtcaatgtcgttgttgaaggtatcggagaccacggctgtgaatacatgacaggcggccgggttgttgtcctcggggaagtcggcaaaaacttcggagcggggatgtcaggcggtatcgcatacgtcctctgtgatgatgccaaggcatttaaacgcaaatgcaatacagaaatgatttcatttgaaaaactgacggatgagacggagatcaaagaagtgaaagagatggtgaaacggcattcggcgctgacaaacagcaaaaaagcagcaggtctcctggacaattgggaagaagccgtacaaacctttatcaaagtcattccgaaaaactataaacaaatgctcctcagcatcgaagaacaaaaagcggcgggtttatcagaagaagacgcaattatgtatgcttttgaagccaatacaaaggctcagcaaacgccggccaaagatcaaaaacaagcggtagtgcagtaagaaaggggagaggaacatggggaaaccaactggattcatggaagaaaaacgagaaaaaccggctgagcgggaccctctcactcgcttaaaagattggaaagaatattcggctccattttcagatgaagcgtcaaagcggcaggggtcacggtgtatggattgcggcacaccgttttgccaaatcggtgctgatatcaacggttttacatccgggtgcccgatttacaatctgatcccggaatggaatgatctcgtctatcgggggcgctggaaagaagcgttggagcgtcttttgaaaacgaataactttcctgaattcacagggcgggtctgtcccgctccttgtgaaggatcttgtacgctggccatttcagatccggctgtttcaattaaaaatatcgagcggacgatcattgacaaaggttttgaaaacggatggattcagccgagaattcctgcaaaacgcacaggaaaaaaagtcgcaatcgtaggttcaggcccggcaggtctggcaagcgctgatcagctgaaccaagcgggacattccgtgacggtctatgagcgtgctgacagagccggcggcctgctgatgtatggcattccgagcatgaagcttgagaaaaatgtcgtcgaacgccggattaaacttttgacgcaggaaggcatagattttgtgacaaataccgaaatcggcgtagacataacagctgatgagctcaaagaacaatttgatgccgtcattttgtgcacaggcgcccaaaaacagcgcaatctgctgattgaaggccgtgacgcaaaaggcgttcattacgcaatggactatttaacactggcgacaaaaagctatttagattctaatttcaaagataaacaatttatagacgctaaagggaaagatgtcatcgtgatcggcggcggggatacaggagctgactgcgtggcaaccgccctgcgccaaaaagcgcgcagcgtacaccagttcgggaaacatcctaagcttccgcagacgcgcacgaacgacaatatgtggcccgaacagccgcacgtctttacccttgaatacgcctatgaagaagcgcaggcaaagttcggcaaagacccgagagaatattcaattcagacgacaaaaatggtggccgataaacagggccgcttaaaagagattcacaccgttcaaatggaaaaagtaagaaatgaattcggaaagtacgagtttcatgaactgccgggaacggaaaaagtatggcctgctcagctggtgttcatcgccatcggttttgaaggaactgaacagccattattgaaacagttcggtgtcgattcagcaaatcataaaattcaggcagcatatggggattataaaacgaatgttgacggcgttttcgccgcaggggatgcgagaaggggccaaagcctgattgtatgggcgattaatgaaggccgggaagcagcgcgcgaagtcgacagttatttaatggggagcactgttttaccgtaaacaaaggggattatttataaaaccggctggaatcagccggttttttgcattgaaacgaaacctctttcttcctgcgttggtcatataagggcaacgcgatggaaatggaggataacaaatggaatttcgttttacagcttggagagattattttcatagaaatcaatcagcagtcagagaactgaactgtaaacatgatcagctctctaaaactgagcgccgcgttatttgttcttcagttcagcagtttcaaatcggggaaagttcagaaggcctgtatttgatagctgctgctaaacgtttcttaagggattgtacagacaaaagttatctggaagcgctgattttatttattcaggaagaacaaaggcatgcgggtgaattggaaatattcatgaatcggcataatatccccaagctgaaaaagcattgggttgatcaagtcttccgcagactgagacgattttcaagccttgagcagtcgatcacggtgctgctgacagcggaaattatcgccgccgtttattatgacgccttaaaaagcgtgactggctccgtgtgtctgcagtcgatttgtgagcagattttaattgatgaagaaaaacatattgaatttcaggcggaagcgctgcgcaagcttggacggcgccgcttaaagatcaccaacatgtttgctgtgctttcccgttttattttattaacgtgcactttacccgtcgtgtggctgtaccatcgaaaagttttaaaaaccgggggaaaacacttttttatttttttaaaagaaacatatcaagaatatgtcagagcggaaagacttataaacaaaaaagagaacggaagggtccgctcctctttttagacatctatacgaaagccgatattgccgaactgccgtccgtctcgcattctgttaaaagctccggctgcttctttgagaggatacatacggtcgataatgggacgaatgccgcagcgttttatcaattccagcatttccgcgaattcctcattgcttcccattgaggttccgagaatatgaatctgcggaaaaaacagcgagcgaataggaaattcgagctgatcgcctgaactggcaccgaatgttatgatccggccgttcggtttcataatgtcaagatagtgttgaaataaagcagggcctacaccgtcaagtatgatatctgctttttcgccattcagcgcttcattccagtcaccgtaactgtcaattgcccggtctgcaccgtatgtcagcgcggtttgttttttattttcactgcgggaggtgacgctgactgtcgctccgattgcttttgccattaataaggcgtatgttgccacgccgcttccgattcccggaagaatcagatgttcgccctttttcaattttccttttgtaaacaaggcccgatacgcggttaatgccgataacggcagtacgcctgcttcctcccatgtgaggtgttcgggttttaaaacggcattttccgcaggaacgatgacataaggtgaaaatgttccgtcgctcggtccgcctaaaatatcagggacgtctggtgcgtcctcaactgtcttccaattcagcaccgggtttatgatgacttctgaatgcaataaatgagaacggacgccgtgtcctatttcggttacgattcccgcgccgtctgagccgagaataaattcacggcttccggtttcgtgttttttcattaaaaacaaatcgcgatgatttaatccggctgttttcagctttatttttacttctccgtttcccggacgtttgtttggtgtctccctgaaatcaaagctattttcgtgtatgataagggcatccataattcatttctcctttatgattgatgagaaaaattttacaggctgtatcagctgcagtaaatcaatgaaaattgatagccggctatcaataaaaatcataacaagaaggtgcccatacatggaaagcggagatttaaaggtttttcaggctgtcgcccgcaaaggcagtatttcaaaggctgccgagagtctgcattatgttcaatcaaatgtgacaaaccgaattcagcagctggaacggcatttgcaaacacagctgttttaccggacgaatcggggaatgacgctgacaccagcaggtgaaaacttattaaaagacgcagacagaattctgcatctgctgcatgaggcgcaaaaaacagcgcaagaggccggcaatccgaacggcccgctccgaatcggttctcttgaaacggcggcggccgtccatctccctcaattttttacggagtattgtaaacgttatccgaaagttcagctgtccctgtcaaccggtgatacacataccttggtgcagcgcgtcttgcattatgagctggacggcgcttttgtttatgggccggtcgaacatgaagaccttaagcaaatcgctgtatttcaagaagagttggccttggtctcaaacacgcgggaaggaagcttgccggacttgctgcgagagccgattttgttttttgcggcgggctgttcgcaccgccgtaaaataaaaaacatattgaaagaagaggcagtgcctgtacataaaatcattgaattcgggacgttggaaaccattattagtgcggtgcaagcggggatgggagtttcctttttgcctgcttcatccgtccgttattttcaaacccgggaaaatctttttcttcatcagctccctgaacattttcgggagatgaatatatcattcatttaccggtgtgatttatttttgacatcggcgtttgaagaactgctgaatggattaaaagcattacagaacggaagatgagaaaaccggaagctgtatacgccaaccttttcttactgatatttttcgggaaaactttctttttccgaaaatttatgtataataaaagaaagtttttctgataaagaatctgcaatgataaggacatgagctattctaaccggcatacagagagggagggcgcggctgagaccttcccggcacgaagaatggacttaccgccttttgagctgtatcggtgaacgaaagcagccgataccgtatagccgcgttacggcgaaaatgagccgtcacttgagtggcgggaatttgggtggaaccgcgggtctgacacacactcgtcccttgctttgggatgagtgtgtgtttttatttttatattagaaaaatggcaatgataaggacatgagtcattctaaccggcaatacagagagggagggcgcggctgagaccttcccggcacgaagaatgagcttaccgccttttgagctgtatcggtgaacgaaagcagccgataccgtatagccgcgttacggcgaaaatgagccgtcacttgaagtggcgggaatttgggtggaaccgcgggtctgacacacactcgtcccttgctttgggataagtgtgtgtttttatttttatcaaaaataaaggagagatcagaccgtgcagaaaccacacattgtgattacttttcctgacgggaaacaaaaagaatacgagaaaggcattacgttagaagagattgcccaatccatcagtccgagtttgaaaaagacgtcagccgccggcaaggtaaacggatcgttatatgaccttggaagaagcatccatgaagacgctgaaattgaactgtgcagctttcagtctgaagaaggactggaagtgatgagacacacagcagcgcacgtattggcgcaagctgtaaaacgtctgtatccgaaggtctgtttaggaatcggtcccgttatagaaaatgggttttattatgattttgatatgaatgatacgattactgaaaaagatttgcccgccattgagaaagaaatgaaccggattatttcagaaaatccgaaaatcactagagaagaaatctccagagaagaggcagagcagctgtttgcgcacgatccgctgaagctcgagctcttagcagatattccgcagactgaaacagtcagtatataccgtcagagcgaattcgtggatttatgccggggaccgcacttggcgtctgcaggacagataaaagctttttcactcactcatgtatcaggggcttattggcgcggcgacagcaatcaaaaaatgatgcagcgaatctacgggaaggcctttgcttcaaaaaaggagctgaacaggcattttcagctgttgaaagaggcggagaagagaaatcaccggaaattgggagcggaattacaactttttatgttttcagaagaagcgccgggtatgcctttttatctgccgaacggtcagttcatccgaaatacgcttgaatcatttctgcgttcaaagcaggatgcctatcattatcaggaagtgcgcacccctatgatgatgaatcagcgtttgtgggagcaatccggccattgggatcattataaagagaatatgtatttctctgaagccgatcaacagcgcttcgcgttaaagccgatgaactgccccggccacatgctcatttttaaagaaaggcttcgttcttatcgtgaacttccgattcggatggctgagttcggccaggtgcaccgccacgaattcagcggggcgctcaatggcctcctccgcgtcaggtctttctgccaggatgacgcacacatttttgtaacgccggatcagatcgagagtgaaatcgcttcagcgctgcagctgattcacgaggtgtacaccgcatttggtttttcctatgatattgagctgtcaacgagaccggaagactacatgggaagcgaacgcttgtgggaccgggctgagagcgcattagaaagagtattaaaagaacagggatatgattttcggtttaaccggggggatggtgcattttacggaccgaaaattgatattcatataaaagatgcgctgaaccgaagccatcaatgcgccactgtccagctggattttcaaatgccggagaaatttgatttaacatatattgatgaaaaaaaccaaaaagtgcgtcctgttgtcattcaccgggcagtattcggatctctcgacagattcctcggaatcattaccgaacattacggaggagcgttccctttatggctcgctccggtacaggcaaaaatcatccccgtgtcaaacaccgtacaccgggactgcgcagaacaggtgcaccggcagatgaagaaagcgggcatccgggctgagcttgatcagcgggatgaaaaactcggctataaaatcagagaagcacaaataaaaaaaataccgtatattgctgttgtgggggatcaagagtgccgtcatcatactgtacacgtaagacaatacggacaggaagacacatttgaagagaatgtgagtgattttgtttcccggatcataaatgaaacaaacaagagattcaagtaaatcaacattgacatatcgcaaaatcaagatataataaaacgtatgaaacctattgatgtttttaaagcgttgtctaatgagtcgcggcttgagattttacaatggctgaaagagccggaccgtcatttcgccccgcatgatggcattgatatgaatgagatcggagtatgtgtgagtcagatcaccgataagcttcagatgacacagtcaacggcgtctcaatatctttccatccttcagcgggcgggccttatccaaacaaaacggattggcaaatacacctattataaaagagatgaagaagcgataaaggcgatggccgattattttcagcgcgaaatgtagggctgaatcctttagacaagggattcagttttcttttccaacattacatcgacatattgcgatttgtttctttaatatgttatatcgatatattccaatatatctttatataaaacatttatgaaggagtgtgtcatgtgcaaaatacatggaaggtttatattttggcgattatcagctttttggtggggacgtctgaatatgtgatatccggggtgcttgataaaattgcaggttccttgggagtcactgtagcagcggcagggcagctgattacgattttttcgctcgtttatgcaatcggaacgcccgtcatgatggctcttacagcaaggctggacagaaggaagctcatgatctatgctcttggactgtttgttatcgggaatataagttcgtttcttgtgcagggatacggcttatttgctgcagctcgggtgatcatggcgcttggagcgggaactgtggtggttaccgcgcttacgatcgcagcaaaaatcgctcctccgggaaagcaggcaagctctctcgcgacagtcattatgggatttacggcagcgcttattatcggtgtgccgatcggaagaaccgtgtcggaagcttttggctggaagatggtcttcgccggtattgcggcaatcggaatcattgccatgcttattatacgtttcgcattgcctgagataaaaggggataaacccgtaccgctcatcaagcaattctctctcttaaagaaacgaaaggtagctgtcggcctggccatcacgtttttttggctcggaggctattcagttgcgtatacgtacctttctccgtatttactgaacgtcactcatatcggcagcggaatgctgagtacattgctgcttattttcggtatcgcaagtcttgccggttctaaagccggcggtttcagcgcagacagatggggggcgcgtgtcacattaaccggcggaatggcgcttcatgctatcatgctcatgttattgccgtttgttacacattctactgccggagcagcggccgtgcttatattttggtcctttgccgcctggtcatcagggcctgcccagcagtatcatttggcaacgatggagcctgaatcatcgggggtattacttggccttaaccagtctgtgatgcagctggctatggcggcgggggccggaatcggaggcattgttgtcactcatctgtctctggcgtcagtgacatggatcggagcagctggtgttgtcattgcgatgtgcagcgtgctttcgcttgcatcgttaacatctgaaaaaacttcatctgaatacagcgcagaataaacaaaagcctcatttctcagcttgagaaacgaggctttttgtcttgttatttttcacattttttcaggtttacgccgattgcggctccgtttcgacttgagtcggcaactccggtgaaggtgccgttctcacggtcgattagtatgctttgcacgtttccgatatcaaccgggcttgcgccgaatttatgccccatttcgttcagttttgtgcgggcttcttccggcactccttcttcatatcgataggatgtcatactgtttgtgtaaattctcggctcttcgaccgccgctttcagatccatgccgtattcgactttgttcaggatcgtttgcagaacggaagagataatcgttgctccgccgggggagccgacagtcaggacaggttcgttatttttgaataaaatggtcggggtcatgctgctgagcggacgtttattcggctgcacttcatttgcgccgcccggcaccgcatcgaagtctgttaattcattgttcaaaacaacgccgtatccgggaaccataatgccggaaccgaacagctgttcaatcgttgtcgtgtaagatacgacatttccgaagcgatcggctaccgtgaagtgagtcgtttggccttcttgtttgtcagtcggctgctccacttgtttatagtttgcagaaccttcctgataggcccaaggatcgccggctttcggctttttattcactttattaatatctatcagctgtctgcgggcattgatataatctggattcaagagacctttgagaggaacgttgacgaactcgggatctccggcaaatgcggctcggtcagcataagctaaatgcattgtttcagcgagaagctgatatttttgccaagaacggatatcatattgagaaagcttaaaatcatccagaaggttcagcatttgtaacaggaaaacaccgccggaacttggaggaggagcagtcgcgatatgatagccctgataatctccccagatcggctcgtcaatcgttacgttaaagtttttaatatcttgttctgtcattgagccgccgaattcctgcactgtttcagcaagctttttggtgaatgctccgtcgtagaatgcttttgtgcctttatacttaatggcagtgaatgttttggctaagtctttttggacgagtgtgtctccttctttcagaggttctccgttcggaagaaacacgtcttttgcagcagtgtgtgataatttgtctttataatctgagatggcatcagctaaaaccgaatcaatcggaaagccctttgaggcaagtgcaatggaaggggtgatgagttgtttcatggagcgtgtgccccacttgtcgagcgctttttcaaggccttttaatgttcccggaacaccgacggcagtcccttttgtaacccgttcggagaaaggaatggctttgccgttttcgtcaaggaacatatccggtgttgcgcctgccggtgcgcgttcccggctgtcgataatggtggtgtcttttgtcttcgcatcataaaccatcataaatccgccgccgccgatccctgacatcatcggttcagttacgtttaatgcgaattgaatcgcaaccgcagcgtcaattgcattgccgccttttttcagcacgtcagcaccgatttgtgaagcgagaggatgggcggtggcgaccatgccgtctttgccgacatctacctgtttgtagtcatcataggaaaacgggtgtttcttagcctgggcgtgataagggatgctgccggccgtgagcaaagcactgagcagaacgataaaacagagattcataaactttttctttttcatagtctgcctcctttgttttccgcttacaattatagagtaagtaaaatgtggtgttttcacaagtgacaaacggaatagtccggtgtgcaaaaagtcagggtttctgtgtgaatataatcagtcgggaatgggataaatgggaaaccggacagtaaaagctgtgaaacaagcataaagacaaaaaataagctacaataaacaaaacagaattcactcacatgacatatgaaaggaacgtgagccatgtatttaaccattaaagagacagcggagtttaccaatcttcctgaagaatatgtgcataatcttgttttaacgaataaaataagggccgtccatgacggacagcaatatttaatcaacaaggaacaatttcacacccatctcgaacagctggaaaaatataaggaaatgattcaggagtttttaaatgaaccgctccctgaagatattgatgtaaaagatgaagattaggacacaatttcatattgtgtctttttttgtatcttttttcggttgttctcaaaaaacggatgctcagatttcgttttaagggcgttgtttttattttttaataccatgtgtatctatttggttaaaatcccgtcacgggggtaaaaatagtgtttatgaggatcgagctgaaaatacgcgcctttttcttcttatgtaacactatgtatattatgttacgtaagaggctttatcctttatcattcaatgggtttcggctataatagtaacataaagatcaatatgttactttaccatttataaggggttttttgatgcacatcgtacagccgatccgaagtttggagaagatccaggaagtcaaacagtatttaaagaagaaaagtgaacgtgattattttttatttattttcggcatgaacagtgcactgaggatttctgacgttctgccgcttcgtgtgagagatgtcaggaacaaagatcatgtctgggcaaccgaaagcaaaacgagaaagaaaagaaaaattctgatattggagtctctaaaggcagacatatacgcttacacaaaagacatgaaagagaatgactatttgtttaaatcgaaacggacgaacaagcctatttcccggattcaggcatacagaattttaaaagaagcggctgctgcgtgcggattggaggaaatcgggacgcatacgctgagaaagacgttcgggtaccatttttatcagcggacgaaagatattgctgaactccagcggatattaaatcattcttctccgtctattacgatgcgttatatcggaatagatgaagatacgacgagagccgcctataaagtattcggaggactgtaggcttgaaaaaaacagccgccagcgttactataatagaagcaggctctagtagcacagcggatagtgcagcagtttcctaaactgcaggtcgggagttcgaatctctcctagagcgttttccacataagataggtgcagattaataatgtcggcaaaacagaaaaacccttgtgtaacaagggtttttgtcgtttttgtgctgatttatccagagaaatatcaaaaaagcccgctgtaagcgggcttttctttatataacagcatcaaattgattgactttccaaacgttgttttcttttacgaatgtaacgtcgcgttttgctgacggagagccgtcaagagtcggtacagtgaagcggtatgtttggacgcttccttttttagaaagaagggtcatttttgcttttttccaattcaggaggttgtctccgtcgccgaccggaacagccaatttgccgtcttttacagtgaagtggtaatctttgagccctttatcaatcgcttgctttgtgaatgcgggtgtcaggtattttacggctttcgcttttgttccgagctctttgcacatgaacacatattgcatattttgatattcgaactgttcagatgtacagtttgcgtttgatttaagcgcgcctccgctcatcgtgttccagaaatgttctcttgctgacagagccagctgcagtgcctgtttttgtgtaaggtcattgggcgtatttttggcagtcgccgcagtgcccagtgatagaatcaatgtaatagtagtaaggaataatagccattttttcatgatttaatctctccttcaacgaatctctttctcttatgttacaaatgttacaataattacggtaagattacaataccttttcagaaatattttccgtactttttatttttatgattgatttcctgtaagacgcaagaaaaagataaagagtttcattgaacaaaaggtttttacaagctgtctgctgaataataaaatggaagaaaatcaaaaaaggagtcctacatatggaagtacaagataatctggagacatcggaagaccgcggccaatctgtctggcgatcgatgtcactgtttttagtgccgctgcttttaagtaatgtattgcaatctgtcggccaattggtcggaatggtattcgtcggaaggtggctcggagtcgatgcgcttgccgccgtatcatctttttttccgctgttttttctgctgatttcctttacgatcggaatcggttcaggaagttccattctgatcgggcaggcttacggcgcgaaaaacgaagagaggatgaaggcgattgtcggcacgacactgacttttacctttatgctcgggaatgtgctggcagttgtcggcagtgtgtttacacttgatattttacggctgatgggaacgccggaaaatgtaatagatgtcagtgtccgatatgcgcgcattttgttttgtgcaatgccgctgatgtttttatattttgcttatacgacatttttacgcggaacgggagattcaaagaccccgttttatacgttaatcgtcagtacagtcattaacatagggctattgccgttattgattctcggacttttcgggcttccgaagttcggcatttacggatcggcgtatgcaacggtgatttcaaacatcgtgacatttatcgtactcatggtttatttgaggaaaaagaagcatccattggcatttgaccgggctgctttccgctctcttaaaatggacagaaagctgcttgcgcttttactgcggctcggtattccgtcgagcatcaatatgattctcgtatcactttctgaaatcgcggtcatctcttttgttaatcattacggatcaaacgcgacggcggcttacggggtcgtcaaccaagtggcgagttatgtgcagatgccggcggtaagcctcggtatcgccgtttcaatttttgccgcccagtccataggggctaatcaattcggccggctgaaacaggtcatcaaagtaggcatcggcctgaattatttgatcggcggggtgctgattctgctgatctataccttcacccggcagatactggccttgtttttaacagatcaggatacactccatattgcccgcaatcttattatgattacactttggagctatttgattttcggtcacgctcagattgtttcagcgacaatgcgggcgagcggtacggtgttatggccgacgattatcagcatttttacaatttggggaattgaagtgcctgtcgcctttattctttctcattacacaacactcggtattctcggcatctgggtcggttatccggcggctttcgtcgtcagcctgctgctgcaatacgggtattaccgatttgtatggaagaaaaagcagattacccggctgattcaataagattttacagcacatcgctcagttcatacgggcgatgtttttttatagaaggaaaatgagtttagaaaatggaattcctatacatgctagaaaacaaggaaagggcaggtgcttatgaagattgaacatacgacttatttaggggtttcagccgtaaaagcggagactgaccaggctgaatgcatcattgtgccggaatggggctcaaatgtcatatcgattcgggataaaagaacaggtatgcggcttctgagagaaccggaaactgcggaacaattccgtgaaacaccgatgctgtacggtattcccgttttattcccgccgaaccggattacggacgggacgtttcgttttgacggccgcacatatcaatttgagataaatgaagaggataaacataatcatattcacggctttctttacaatcagcattggaagttggcgggtgcgaaagaagagggggatgaattgacagtcgaaacagagattgatcttacagaaattccccgtgtccataaacaatttccgcacgatgtcattgtgcggatgacatatacattaaaagacaatgtctttacccagcgggcgctgattatcaataagggaacggaggcttttccgtgggggctcggctatcactcctcttttgtttttaatgaagagcgggcacgcctttttctgacggctgaccgcatgtgggaattaaatgaacgtttcgtgccgacgggccgtttattggatgttcctgataaagaagcatttcgtaacgggatgtctttgaaaaataagcaatttgatgatgtttttctttcttccggccggaatggcggcaataatgaagcggttatttatcatccggatgagcagatatccgttttgtatcaggcagacacgtctttcaagcattgggtggtatttaacggtgacggtaagcaagggtttgtcagtctcgagccatatacttccgtcacagatgcgtttaatctgaatcagcctgcatcactgacagggcttcagattctgaaaccgggcgaagaagcggctgcgacatcccggatcaccattttgcatgacgaagaataggaaagaggcaggataatattgaaaacatatgtcaaacgcttgagcgcggtgattctgcttttgatcatagccgcagttccttatattgatgattccgcgaaagcggccgaacaaaaaaatgctttgcaaaaagagctgcaacaaatcctgaatgaagaacctgctttaaaaggcgctgcagcgggtgtcagtgtacggtcagcaaaaacgggagaagtgctgtttgcaagcggggaagatatgcggctgaggcccgcatcactgatgaagctgctgacggcatctgcggcgctttctgtgctcggagaagattacaggtttaagacagaagtacgggcagatggcgccgtgaaagggaaacagctgcacggaaacctttatctgagagggaaaggcgatccgactctattggcttctgattttgagaagatggcaaaacaggtcaaagaaagaggcatccgcgtcattaaaggagaactgatcggggatgattcgtggtatgacgataccaggtattcagttgatcttccgtggagcgatgaaggccaatactatggcgcgcaagtatcagctcttaccgcttccccaaacgaggattatgataccggaacggtgatggcggaaatcagcccggcaaaacagcccggtaaaaaaccgcgtatttcgatttcccccaatacggacgtcgttcgcgtgaaaaatgaagtgaagaccgtcgcttctgatgaaaagaaagatttgacgattgaacgggagcatggaggcaatgtgattacagtaaagggtaccataccggcgggcgtggcaaaggcaaaagaatgggctgcagtgtgggatccgtcgtcctatgctttagatttatggaaacaagcgcttaaaaaacaggggatcacagtaaaagggaaggtcaaaaccgggcgcatgccccgtcacaccaagctagtcacatcacggacatccatgcctctttcagaattattgattccgtttatgaaactgagcaacaacggccacgccgaaattttgatcaaggaaatgggaaaagtgaaaaaaggcgagggcagctgggaaaagggcttagatgtgatgaaatcagagctgaaatcgttcgggctgaatccggatgaattgattgcaagagacggatccggcgtttctcatattgacggtgtatccgccggccaaatcggagagcttttgtatgcggttcaaaaagaaaagtggtacccggctttccttcgttctcttcccgtcgccggggcgagtgacagaatgacgggaggcacccttcggaatcggctgaaggatactccggcagaaggcaaaattaaagcgaaaaccgggtcattaacgtcagtcagttcgatagccggctatgcagatacaaaaacaggagatactcttattttttccgtgcttcaaaatgggctgctagacgaagatgacggaaaagacattgaagacaaaatcgcagtcgtgctggcaaatcaataagaaaagccgatccttacaggatccggctttttttgatggagaacgaaatctgcaaaacattatattgccattatgaatcaatctcttcaaaaagtaatatattcaaaattaagcttttttttacactttcttttcttatatgttcaccgatttttcatttttatcataaaaacttctttccgggaggcaaaatctttttaaagacgcgatttattatacattttattccttattatagtgtttaagaactggtttgcattgtgcatacataccgttttacatggtataaagataatagaaatgaagaatcgaagtaaggagattatactatattctaaaaaatgttagaaaaaatttaattttttattgtgatttctaaaatatgttttaaaataatgcttatatggatgatttagtcatatgctgtcgaattttaattgtaattatttcactttcttatcctcttaaattgaagcggagggattccattgaagaatactgtttatgctttaactcacgcccaaagaagagtgtggtttacggagctgctcgagccgggcacaagtatctgcaatcttgcggcgtgcgtcaaattcaggggaaacatcgattttgacgtactgcgccgtgctttagatttctctatcttgcaaaatgattcgctcaggtttcaactgacggaaggcgacggatcagaaccccagctgtatctggccgggcattcgccgatttctttagaaaccgttgattttactcatactgatcaatcagagcgggatgcatggattgacacacagacgcgtgttccgttcaagctgtttcattcacctctgtatcaatttactctgcttgtcatgtcagacgaagaagtttggctttattcaaaatttcaccacattatcatggacggcatctcgctcaatctgctcggtaaccagcttattgatatctaccaaaagatcatgcggagcgaggatttaactgatcatcacagaccttcctatctcagctacatggaaaaagaacagcaatatttacagtcctcccgttttcaaaaagatcgttcattttggactgaaacgtaccgaactgttccggaacacctttcattggcggaacgaacctctcaccttagacaaagcactgcagcttccagagacacaattactctttctcactccttagaacaatcaatccggcgtttttgcaaagaaaataatctcagcatcatctctctgtttatggcttcgttatacatatgcatcagccgtctgacggctaaaaaggatattgccatcggtacttattacggaaaccggggttccaagctcgaaaaggatatgctcggcatgtttgtcagcacactgcctatcagaatgacggcagatcctgaggcggagttcctgtcctttgtccgcagtgtaggaaaagagcagctgtctgttatgcggcaccagaaatatccttacaatcttttcgtcaatgaattaaggcaggttcatcacgacctgcaaaatatcatcggtatttcgatgcagtaccagccccttgaatggcgtcaggcagagggcttcgattttgaaacggccatgtttttcagcgggcatactgcaaacgagctttccattttaattaaggagcggacagatacgggattgattgagctgaattttgattatcaatccgctttatttactgaaaaatcaatcaaacgcattcaaactcatttgctgaccctcgttgaaaatgccgttagaaatccagaccagctgattcggcatattgatatggcggatgaagaagaaaaacaacgggtgttaactgagtttaaccgtacagaaatggttgaaccgccggctccgacgcttcacgggctgtttacccgaggcgccgcgctttcgccggatcggccggcgctccggtttccgggcggtatgctgacgtatgccgagcttgatcagtacacagacagactcgctgtccagcttcatcaaaaaggcgtctgtaaagaaagcatcatcggcgtgctcgctgaacgttcgccggagatggtgatttctgtgcttgccgtgttaaaagcgggcggcgcttatgtgccgcttgatccggaatatcctgaggaaaggctgcgttatatgctcgctgacagcggggcctgtctcctgctagcacagtccgggttatccgttcccggtttctccggtgagacgcttgaggtttctctttctgctcttgcatgtgagacggagacaggggctgtctctgaagaagcggctgccgattcgctcgcttatattatctatacgtccgggtcgacgggaacaccgaagggagtggcggttgaacaccgacaggctgcagcctttttatccggcatgcaagggcagtttccgctaacggaagaggatattatcgtgctgaaatcatccttttctttcgacgcttccatctggcaattgttttggtggacgatgtcaggcgcttctgtgtatctgcttccgtccggctgggagaaagatcctgccctgatgattgaagcctttgtctctgaaaaggtgacgaccgcgcattttattccggcgatggtcaacagctttttagacgcgctggaaacggagcctgaggaaacaagaatccgcctcggcaaaacactgactcgcgtgtttgccggaggggaagcactttcaccgcttacggctgcccgttttgccgatcttttgccggagaccgtgctcattcacggctacgggccgacagaagcgacggttgatgcggccttttacgtctgtgaccgaaaacgggacagcggcaggacaaggcttccgatcggaaaacccgttccgggtgcccgtctgtatgtgttagacggcggaggaaccgttcagcctgcgggtgtggccggagagctgtacatcgcggggacaggtgtggcgcggggctatctgaaccgccctgagctgacggaggagcgttttctcgatgatccgttttatccgggggagcgcatgtatcagacaggggacatcgcccgctggacagaagacgggcttgtcgaatggctcggccgttcagacggacaggtgaaagtccgcggctaccggattgaaccgggagaaatcgaagcggcgatccggcgtattgacggcatccgtgaagcggcggtcaccgcccggaccgaccacggcgataccgcgctttacgcttatatcgaaggccgaaaaagcgatgacgtgcgggcggagcttgcggcacgccttccggcttacatgatgccggctcagttcatagagatgaccgagtggccggtcacgccgagcggaaagcttgaccgccgcgcgctgccggctcctgacggagcggcagacagacaggcgtacaccgcaccgcggaacgtcacggaaatgaagctttgcgccctttgggaagaggtgctgaaaaacggccccgtcggcatccgggatcacttttttgagcggggcggccattcgctgaaagcgacggctctcgtctcccgcatcgccaaagagttcggcgttcaggtgccgttacaggacatcttcgcccggccgacggtggaagagctcgcttcggtcattcaggacctcgaagagagcccgtatgaagcgattcagcctgcaaaaacacaggccatctatccggtgtcttcggcacagaaacggatgtatgtgctccagcagcttgaagacggcggtgtcggctacaatatgccggctgtgctggaactgacgggcccgcttgaccgcgtgcggctggaggagacgttccggcagcttgttgagcggcatgactcgctcagaacgtcctttgaaacggggcctgacggcgaaccggtgcagcgcatccatgccagcgtgccgtttcagctggaggatgccgggtcagctgacgcatttgtccggccgttccgtctggatgaagcgccgttcttccgtgcggccctcgtgaaagaatcggatgaacgccatcttttattgacggatatgcatcacattatttcagacggtgtgtccgtcaacaccctgattaaagaattcggcgagctgtacgccggccgtacgcttgcgccgatgcgccttcaatataaagactatgccgtctggcagcgggaatttcaacagaaagaagggtaccggaaacaggaagactattggctgaagcggcttgaaggagagcttccggtgcttgaactgccggctgacaagccccgtccggctgtcagaagctttgcgggcggcacggtatcgtgcgcgcttgacgctgaaacggcatccggacttcaccgcatcgcccgggatcacggctccactttgtatatggtgcttcttgccgcgtacaatacgttactcgcgcgtctgagcgggcaggaagatattatcgtcggctcgccgattgccgggcgcccgcacaaagaccttgaaccgattctcgggatgttcgtcaacacgctcgccatcagaacggagccgaaagcggacaaacggttcaccgattacttggcggaagtccgccaggccgcgcttgaagcgtacgagcatcaggactacccgttcgaagagcttgtggaacggctcggcgtgcagcgtgacacaagccgcaatccgctgtttgatgcgatgcttgtcgttcagaatatggagcatgcggaactgctgctggacgatttgcatattcagcctgcggacatgtcccgcccggtttccaaatttgatttcactttgcaggcttctgaaggcgggggacagattcattttctgtttgaatatgcgtcggctctattccgaaaagaaacgatggagcgctgggcttcccactttttgacgatgcttgaacacattgtccgtgaaccggaatcctctttacgggagatcaatatgctgactgtcccggaacgaaaccggattctttcagactttaacggcatgacggataaacagctgccggaaaacacagttcatgaactgttcatcacccaggcgcgaaaaacacctgatagggcggctcttatcagcggggataagtcagtcacatataaagaattagatgaatggtcgaataaaatcgccagagctctgcaaaaacggcagatcggaccagatgccgccgtcggcattgtgataccaagatcaccggaacaagccgcggcagtcttcggagtttggaaagcaggaggcgcctacgtcccgatagatcctgaatatcctgaggatcgcaagcaatatatcatcgcagacagcggcacagcgcttctccttaccgtagacgatgcgatagatcaagtgcctgacggtttcaacggtgaagtactcgcgctggaagatataaaagaatcggacgcttcaccggttcagtcactgtcagcgccgggggatttggcttacatcatttatacgtccgggacgacaggaaggccgaaaggggtgatggttgaacatcgatccgtcagccaaacgcttcaatggcgaagcagtttttatgatctgaatgagaaagataccgttcttcagctcttttcattttcctttgacggatttgtaacaagtatgttcacaccgctgatttccggtgcgaaagtggccgttttagctgaagatgaagcgaaagatattcttgccattaaacactatctcgcttcgcagcgcatcacacacatgattattgttcctgtgctgtaccgtacactgcttgacgtactagagccgggagatgccgagtctctccggtttgtcacattagcgggagaagctgtcgatcaaaacattatcagccgcagtttatcggtttgtcctcatacggagcttgccaacgagtacggcccgacggaaaacagcgtcgctactacagcggcaaggcatatagaacaaaatgaggacattacgatcggccggccgattgatcattcacaagtttatattttaaacggagatcatccgcagccgatcggtgtaacaggggaactttgcatctcgggttccggccttgcaagagggtaccgtaatcttcctcagcaaacggctcaagccttcgtccaagatccgtttcgtaagaatcagcgcatgtaccggacgggcgatctggcaaaatggctgccggacggcacgctgcaatatatcggccgaatggacgagcaagtcaaaatcagaggctaccgggtggagctgaaagaaattgaggccgccttaacaggcataaaaggcgttaaagaagcagccgtcaccgctcagcccgcatcagcaggccaaacggaactatgcgcttatatcgtgacagaagaaggaacagacagcgaaaccgtgcagcaggcgctcagaaatgaaatgcccgcttatatggtgccggcgttctttgaaacgcttgagtcactgcctgtcacaccaaacgggaagcttgaccgccgcgcgcttcctgagccgcggaaaaaagcacagacgggacgggcgtttacggaacctgccggcgccattgaaaaagagctggcagcgatttggagcgaagtgctcggaactgaaaatattgcagcggatcaatcattttttgagcttggcggcgattccatcaaagccctgcaagtatcggcacgattacaccaggcaggaaaacagatagctgtaaaagacattttcagccggcctacaattaaagagctggcgccttatgtccgtacagagcggcagccggtcagccaagctcccgcacaaggagaagtgaagtggtcgcctgttcaaaaatggttcttcacacaagacatgacggaagcaaaccattttaaccaatccgttatgctgacgagaaaaaatccaatagatgaagaggccttaaggaaaacgttaaaagccattaccgttcatcatgatgccttgcgacttgtgtgcaaaaaagatggagagaaaggctttttcctcttcaacagaccggctgatctcgcagatgagcagctttacaacctggctattttagaagtgtcaggcgaagagcatgaaaaagaacgttttataaagcgccgcgtttcagagcttcaaagaaacatggatttagagaacgggccgctggtacaggcggggctgttccgctctgaatcggaagattacttatttctttccgtccatcatctcgccgtcgacgggatgtcatggcggattttactggaagacttggcttctgtctatgaacaggcggcttcaggaaaggaaatcaatcttcctccgaaaacagtgtcattcaaaacatatacggagcagctggccgattacgccgaaagccggcagctgcttcagcaggcggagtattggcgggagattgaacactatgaaacagaaagtctcccttacgagcaggcagatctatatcaagcttctgcgaaaaaacgaaacacggtatctttcacattgacggaaagtgaaacagacgccctgctgagagatgtgcacagcgcctacaatacggatacgcaagatatacttttggcttccgccgtactggctgttcaaaaatggtcgccgcggcatgctttgaaaattgcccttgaaggacacggacgccaaacggagcagggcggtgcggatatcagcagaacggtagggtggttcacttccatttacccggtgcttttccggagcggggcttatgaacctcttgaagaatatgaaattcgcacattgaaaactgtcaaagacacattgcggcgcattccggagaaagggaacggatacggcgtcctcaaatatttgaccccgccgaagcttgccgggatgaccttcgggaaagcacctgagatcagctttaactatctcggacaattcgatgcgcccggcgggaatccggcagaaaccgaacagcctgacgcatttctgttttctcctttgggaggcggagatgatatgacggatacatggaaacgggagcagtcacttgagatcagcgcgattgcggcacaaggccggataaccgttaacatgtcctatgatacaggacgcttccggcaagatacgatcgaacggctgtccgaaagctgccggtattttctcttgaaactgtcggaacactgcctcggcaaaaccgatacggagaaaacggtcactgattttgatgatcgggagctgactgaggaagcattacaggatattgccgacttactcagctttcactaaaaccgagcgggaggaaaacatggacaaaacgaaaaatatccaaaacatttatcccctcagccgaatgcaggaaggaatgcttttccattcctttctgcaaaaggaggggtctgcatatatcgagcaatccgtcttcaccataaaaggccggcttcgtccggaattgtttgaacaaagcgtgcagtctgtcatcagccgccatgacattttcagaacggtttttttacctcatgtcgctcagctgaacggaccccgccaagtcgtgctgcgtgagcgggaattccgattgcgcagcgaagatcttacacatttggatgaagcgggacaaaacagctttatacagcagtttaaggaacgtgaccgcttaaaaggcttcgatttgcaaaaggatatgctgatgcgtgtttctttgtttaaaacggcagacgaagaatatgtatgtgtctggagccatcatcacatcctcatggacggctggtgcctcggcatcgtccttcaagaatttatgcatatttacaagacgattgaatcaggttcgcccgtcacactggcgcccgcaaagccttacagcacgtatattacatggctgactgatcaggacaaagacgcagcttctgattattggaaaggatatttatcggactgtgagacaccctcaggactcccgaaaatatcggcccgtcccccggaggaaaaaggctaccggaagaaggagctgctgttttctttagacgaaaacctgacagccaagctgaaaaccattgccaaagaagagggtgctacactcgcggtgcttatgcagaccgtatggggcctgatgctgcagcgctacaatcggacggacgatgccgttttcggagccgtcgtatcagggcggccttccgttattgccggagtggaaaacatgatcgggctgtttatcaataccgtgccggtacgcatcaaaaccggtgatgaaagctttagagaactgctgggccgctgccagaaagaaatgcttgattcagaggcgttcagctaccatccgcttgctgacatccaatctcagactgagctgaaacaggatttaatcgaccatatcatcgtgtttgaaaattatccgattcagcagcagatgaaagacgcggaaaaggaatcggatgcaccgtttcgaatcgggaatgtcaacgtgtcggaacaatcaggctacgattttaacctgatcatagcgcccggcgatgagctgctcatcaaattcagctacaatgcgaatgtttatgatgaagtatggatagagagcgtaaaaggacatttagaagaagccctgcgcggcgccgccttcaatcccgatgttccggctgaccggcttccgatgctcggacaaaaggaaaaatcaagaataatcggcgaatttaatgatacgaaaacaacttatgaaagagatgaaagcatcatcagcctgttcagccggcaggcggaaaaaactccggatcatcaggcgctgcacgccggcgggctgacgttgacgtaccgggagcttgatgaacggtcaactgaattcgccggcatcctgctggaaaacggtttgacgcaaaagggaatcgccgggattctggccgaacgctcaccggaatttatcatcgctgttctcgctgtattaaaagcgggagggacgtaccttccgcttgatgcagatctgccttccgacagaatcgccgatatgctcagtgagagcggggcacagctgttaacggtacaaaaagggattgagactgacattgacttttccagtatcatttcaatcccggttgcagctgagaaacaaaccgctgacatgagaaagctgaataccgttacagcacctgatgaccttgcctatattatgtatacatccggttcaacaggaaaaccaaagggcgtgatgatttccaaccgaaacgtcgtatcactcgtgtcaaacagcaattactcgtcggccggcacgacggatcgtctcattctgacagggtccatcggttttgacgcagtgacgtttgaaatattcggagcgcttttaaacggggcatgccttcatgtggttgaccgctcgacaatgcttgcccctgagaggttcggcagctatctttctgccaaccgtattacgattctgtttttgactacggcgctttttaaccagttcgcccaggcagacccggagatgttttccggattgcacaccttatatgtcggcggagaagctttgtcgccggcactcatcaataaggtcagacaccgctgcccgaatctcagcctttataacatatacggaccgacggaaaatacgacgttttccaccttttacgaaatcacgcatgatttttctcagccgatcccaatcggaaaaccgatcagcaattcaaccgcattcattatcgataaaaatggcgggcttgcgccgatcggcgtgccgggtgagctttgcgtcggcggtgacggggttgccaaaggctacttaaacaggcctgaattaacaagtgaagcatttgtcagccacccgattcaccctgaagaaaaaatctacagaacaggcgacttggcgcactggctgcctgatggaagcatcgggtacatcagccgtatcgaccgccaattcaagattcgcgggaagcggatcgagccggccgaaattgaagcgcggctgactgaaattgacgggatcagggaagcggctgtcaccgtgtcacaagaaggacaagaagccattctatgcgcgtattatacgggcgcacatattgaagaaaggaccattcgatccctattggcaaggtcgcttcccgactatatgattccgcagtatgtgactaagcttgaccgtatgccgctaaccgcaaacggcaaagtggaccgccgcagactgcctacgccagaacgaaaaaaagcctcatcaaaagccgttccgccccgaaactgggtcgagcgtgagctgatcgacatttggacgccgatcctcggctgcggggagctgggcatacaggatgacttctttgagctgggcggccactctttaaaagcattgcaagtcattcatcagctgaagacgaggcagcagatggatgtgccgattgaaatgatatttgaatatccgacaattgagcaattggctgaaaaactgtattccagcaaactatcagaagctgccgaacagcatatcagcagactgaatcagccgaaaggacgcaatcttttctgttttccgcctatctcaggtttcgggattttcttcaaagatcttgcggcggcattaaatggacgggctgctgtgtacggctttaactttattgaagaagacagcagaatggaacaatacattgataaaatgctggaaatccagccggaaggcccttatatcctcttcggatattcggcaggcggcaatacggcatttgaggcggcaaaagcgatggaaaaacggggcttaaaagtcagcgatgtcattatcgcagacgcgtacagaaagcttgacgcacttccgccgcagccaatgaacgcaacagccgaaaatgtcccggaagcggtcagagaagcggtcatcaaaaagacagagggctatcaaacgtactgggcggaactgataaatgacggccaaatcgcggcaaacctccactttattgaggccggcataaaggaagagcacagcgataagcccgagccgaagaaatgggaaggcgccacaacgggtctctatcaggaatatcaaggcgagggcgcccataaagatatgtttgaaccggcctttgcacaccaaaatgctgaggtcatactggagatcgttgcaaacagcggcagacgcttggaacggaatctgtaacatccggcagaatggttcaagaagacagagggcaagataggggaatcaaacccagttttttggaggcttgtcatgacgaacctatcttggcttacgtatgtaatgatcatccttgccagctaccggctgacccatttaattgtatttgataagattacggaattcataagaaaaccctttttaaagcaagaaaaaaccgtcgatcaaaacgggcgcaccgtgcaaaaaaaagtcccgtcctccacattcggttatatgctgcaatgttattggtgtgcgggtgtctggtgcgccatattaatcggcatctgctatttggtctggccccgctttgctcatccggttattttcattttgtccattgccggagcgcaggccattcttgagacttgcgtcggcgtcggaacgaaggtcattgacgtgctggccgccataaaacataaaaagtcctgaagcgatttgtttcgctttaggacttttttctttctcttttagtcttagaggagcaaagaagactttctgattcaccgcccggaatgcttcggaataccgtaaagcagagagggggaaaaacatgaaaggctgccgttccagcatgatatggtttttggccgttttactgacagccggcatctttacaatgtcagcatcagcaaaagcaagcggcactcagccggagagagaaatgagagccgtatggatcgcgtctgtcaccaatatcgactggccctctaaaaaagggctgtcacctgatgagcaaaaaaaagaatacagcaagctgctggatgacgttcaggcaatggggatgaacgccgttatcgtccaaattaagccgacggctgatgctttttatccatcagattacggaccttggtcagagtatttgacaggaactcaaggtaaaaatccggggtacgatccgcttgcttttttagttgaagagacacacaaacggaatcttgaattccatgcttggttcaatccttaccggatcacgatgaatcacacaaatttgaatgcgctttcaagtgatcatcccgcccgttcccatccggactgggtcgctgcatatggaaaccagctgtattataatccgggcattccggaagtaaggcaatttataacggatgggatcaaagaggtggtcagccgttatgacattgatgcggttcatatggatgattatttttatccttataaaattgccggacaggaattccccgatcaggcggaatacgaacggtacggaaaagctcactttgcatcaattgatgactggcgcagggataacgtcaaccgtcttgtaaaagagatcaatcagaccattaaacgagaaaaaccttatgtcaaattcggaatcagcccgttcggcgtatggagaaacgccgcagatgacccgacaggctccaaaacggccgccggggtgcggaactacgatgacttatacgctgacacaagagaatggatccaaaaaggatatattgattacatcgcaccgcagatttactggagcatcgggtttaaagcagcagcatatgacgtcttgacggattggtgggggaaagaagtgaacaatcgcccggtgcatttatatatcgggcaggcggcttataaaatcaataacaacgctgatcctgcctgggccgacccggaggaatacggaagacagattgctcttaacaggggatcggcatgggttaaaggcagcatgcatttcagtttaaaggatctgaaccgtaatccgctcaatgtgaaaagccgtttgctcaaagacatgtacagccgtccagcattaattcccgagatgccatggcttggacattccgctttaaaaaagccggctgtcaaacgagcggaaaaaaatgcttcaggcaatacactctatatcgaagatgcgaaatccaacggtaagaaaacggcttattacgccatttaccgcgcagaaaagggaaagcagccttatttagtggatacagtcagaaaaacagcgtcacggacgcaaacattttcagatactgatactgatatccgggcgaaaggcgcctgcacctatatcgttacttccgttgacaggctccaccatgagagccgtccctccgcaaaacggacggttaaataacatttttacaaaactgacagctcctgagctgtcagtttttttgcagatgagtcggaatgttcagactttatttgaatggaatgaataaagacccccattaataaaatgtagaaagcagcagaaggaggaagattaatgaattttcaactgacaaaagaacagcagctggtgcgcgaaatggtcagagattttgccaaaaatgaaattgccccgaaagcccatgaggttgatcaatcagccgtcttcccggcagacacatttaaaaaaataggcgaactcggtctgctcggaattccgtttccggaagaatacggcggggcgggcggtgacaccatttcatatgcaatagcggttgaagaaatcggaaaagcctgcggaagcacggggctaagctacgcggcggccgtgtcactcggcgcaagcccattatactatttcggtactgaacagcaaaaacaagaacaccttactccgcttgcttccggaaaagcgctcggatcattcgggctgacagagccaaatgccggttcagacgctggcggaacacagacaaaagccgagaaaaaaggcgatgactatgtaataaacggtgagaaatgctggatcacaaacgccaattacgcccgcacggtcattgtcaccgccgtgacgggaaagaactccgccggaaaaccgatcatctcagccctcattgttccgacagacacaccgggatttacgatcacaaacccgtacgacaagatgggtgtgagaggatcggatacggccgaacttgtgctggaagatgtcagggtgcctgccgacaacctgcttggcgatcctgagaaggggtttaaacaatttttatatacgttagacggcggacggatttcaattgcggcgcttgctgtcggtatcgctcaaggggcattggaggcgtctctgtcatatgcgaaagaacgcaagcagttcggcagcccgatctcatcatttcaagccattcaatttaaactcgctgacatggcgatggaaattgaccttgccagacaaatggtgcttaaagcggcatggctgaaggatcaaaacctgccatttacgaaagaagcggcattcgccaagctctatgcttcagaaatggccgtcagaacgtgccttcaggccattcaaattcacggcggttccggatacatgaaggaatacggggtcgaacgcatgcttcgtgacgcaaagctgatggagattggcgagggaacgtcagaaattcaaagaatggtcatcgcgagacagctgttgaagtgaaatgaaaacgtttaccaaagcaatgatggaaggaggcaggtcatatggctgaacttatccatttaacagcgggaaagctgcttgagcggaccgtggagcttttcccggaccatgaagcggttgtttaccctgagcgcggcctccgttatacgtatgccgagtttgaccggttatgccggcagaccgcaaaagggctgatgaagctgggaattgaaaaaggagatcatgtggccatatgggcatccaacataccggaatggctcgcggcgcaatttgcaacggcgaaaatcggcgccgttctgatcaccatcaatacgaattttcaaatcgcagagttggattacctgctgacccattcagacgtctcggccctgataatcatggactcctaccggcagacatcttatgtcgagttggtgaataaactgattccggagctgaaaacttgtgagcgcggcagactgcgttcgaaacgttatccttttttacagacagtgttatatatcggtgatcaaagcccgcccggaatgcatcattgggatgctctgctgaaggatgcagaaaccgtaacggatgcagagcttgacagaaggatggacagcctgaaaaaggatgattgcattcatatgcaatatacgtcaggtacgacgggatttccgaaaggcgtcatgctctcacattttaatatcgtaaataacgcggccaacatcgcagaatgtatgaagcttacctcaagtgaccgtttatgcatccccgtgccatttttccactgcttcgggtgtgtgctcggcgtgctggcatgtgtatccgcgggggcggcgatgattccgatcgagcagttttctccgccatccgttctgaaaacggtggaacaagaagcctgcacggctctgcacggtgtgccgacgatgtttatcgccctgcttcatgacagcggtttttctgattatgacctttctcacgtccgaaccggcattatggcaggctcgccatgcccggcggaagtcatgagagaagtaatcggcaaaatggggatgaccgacattaccattgcctacggacagactgaagcatcacctgtcattacgcagactagaacggatgatccgtttgaaagaagagtggaaacagcggggcgcgcgcttccccatatcgaagtcagaattgttcggcccggaacatccgaggaggctgcacggggcgaacagggagagctctgcacccgcggataccatgtcatgaaaggctattataaaaatcaagaagcaaccgaagaagcgatagataaagacggctggctgcataccggtgatttggcggtcatggacgaggacgggtactgcaaaatcacaggccgtctgaaagacatgctgatcaggggcggcgaaaatatctatccccgggagattgaagaaatgttatatcggcatccagcggtagcagacgttcaggtcgtcggtgtccctgatccgaaatacggcgaagaggccgcggcgtggatcaggctcaaagacggacaaaccgcttctgcagaagacatcagaaccttttgcaaagaaaatatagcccgctataaagtcccccggtatgtgttgttcacagatgaatatcccatgacagcctcaggaaaaatccagaaattcaaactgcgggaaaaaacgattgaagagctcaagttaatttaatgaaaaaggagtgcttcacaattgtttaaaaaagttctgattgccaatagaggagaaatcgccttaagaataatccgcacctgcaaacgtctcggcatcccctcggtatctgtctattcagaagccgaccgggatgcgctccatgtaaaagcggctgatgaggcctacctgatcggtcaatcgagagtaaatgaaagctatttacatattgacagaatcatagaagccgctaaagccgccggagccgacgccatccatcccggctacgggctgctgtcagaaaacagccggttcgccgaacgctgccgaaaggaacacatcacattcatcggcccgccaggtgacatcatcgttaagatgggaagcaagatagaagcgcgaaaaacgatgcagcaggcaaaagtcccgatcgttcccggtgtttcagagccattgcccgatgttcactcggccttagccgaagcccgtgccatcggctttccggtcatgctgaaagcgtccgcaggaggaggcggaatcggcatgcagatcgtacattcggaagaagaactggcaaaagcgtttgaaggcaatcaaaagcgggccgcgtcttttttcggcgacggcgcaatgtatatggaaaaagtcattgaaaacgcccgtcatattgaaattcagattctcgcagattctttcggcaataccgttcacctgtttgaacgtgactgttcagtgcaaaggcgccatcaaaaagtgatagaagaagcgccatcgccgtttgttgatgaggaattaagacaaagactcggtgaaaccgccgttaaagccgctaaatctatcggctaccaaaatgcgggcacaatagagtttcttgtcgaccaaaagaaacaaatctatttcttagagatgaatacaagactgcaggtagagcatccggtgacagaagaaattacgggactggatcttgtggaagaacagctgaaaattgccgcgggacagccgctgactttctcgcagaaagacatcacccatcacgggcatgcgatagaagtgcggatttatgcggaagatccggtcaccttttatccgtcacccggcactatctcctctttctccgttttacggcatccgtcagtgagacacgaatgcgccgttgaaaagggcagcaccgtttctccgttttacgatccgatgattgccaaaatgattgttacggcaaaaacgagaaaacaagccattgaacaactgaaaaccgcccttggcgaatatcatgtagaaggaattaaaaccaatattccgctgctgacaaaaatcgcctgttcagaagcgtttgaaaagggtgaagcgacaaccggatttttacaaacaataaacggggaggcgtcaaaatgagcgtcataaaaattcaaatggccggtaacctgtggaaaattcatgtgaaaccgggcgatgtcattgaggaaggacaggaagtggctatcttggaatctatgaaaatggaaattccgatcatcgctgatgcatccggaacggtgaaagaagtgaaaaaaacggaaggcgatttcactgatgaaggagaggtcctgattgagcttcaataaaacgggaggtgcagcatgaactgtccgaagcatgtccgcatcaacgaagtagggcctcgtgacggcctgcagaatgaatcggcgtgggtggatacagaagataagattgagtggatcaatatgctgtcaaagacaggacttccctatatcgaagtgacatcattcgtgcatccgagatggattccggctcttcgtgacagtctggatgtcgcaaaggggattgccagatcagaagatacggtctacgcggctctcgttccaaacctcatcggactggaacatgcagcagaaggcagaattgatcaagcctgtgtgtttttatcagcaagcgaaacccataaccaaaaaaacgtaaacaaaccgattgaccggaccgttcaagaactcaggcgggtcattactgaagcaaaagctgaaaaaatggcgacgagagcgtatctgtccactgtatttggctgcccgtacgaacagaacgtgccggtcgaacaagtcgtccgcctggcagacaccctgatcgaaatgggtgttgatgaattatcgctcggcgacacaatcggcgcggcgaatcccttgcaggtcatcgccgtgcttgaagcccttttgccgagaattccggcatcaaacatcgcactccatttccatgatacaagaggcacggctcttgcgaatatcattcccgcccttgatatgggcattacatcctttgatacctcctcaggcgggcttggcggctgcccgtatgccccgggatcagcaggcaacgccgccacagaagatgtcatttatatgcttgaacaaatggggattgataccgggacggacttgaataaacttcttgaggccgccggctggatcggggacaaaatcggcaaagacctgccaagcagaaacctgcaggtattcagaacgaaatgagaaaggagaagccatgggagattgtgtcttgtattccgtctgtcaagaaacgatcggtctgatcacactgaaccgcccgcatgcagccaactcgctgtcttctgaaatgattgatgatttacagcgtgtaattacagacatcagaaactcgccggctattcgctgcgtcattctcaccggctccggaaacacattttgcgccggtgctgatttaaaagaaagagcaggaatgaatcatgaacaagtcaagcaaagcgtcaggcgtatcggcgaaacagccgcctcaattgaagctctcccgcagccggtcattgcagcgctgaacggaactgctgtaggaggaggtcttgaacttgctctcgcctgcgatatcagaacagccgtcagccgggcgggtctcggcctacctgaaacaggccttgcgatcattcccggggcggggggaacacagagactgccgcggcttatcggtcccggcgctgcaaaagaattgatttacaccggccgaagactcacggctcaagaagcaaaagacatgaagctggtcgagcatgtatgtgaagccggggagcttatggaaaaagtaaaagcactggccggacgcatcgccgccaatggaccgatcgccgtcagacaagcaaaattcgcgataaacaagggtctggagacagatctcaatacagggctcaccatcgaacgaaaagcatatgaacaagtcatcccgacacttgacagagaagagggcctgcgcgcctttaaagaaaaaagaccccctgaatacaaaggaaaataaaacatggagggactcggatggattacgaaaaagaacggcagacacgcagcaaaacgattgaaaaaggaggagcggagaaatatcacgcaagcaacgaaaaaaagggaaaactgtttgtaagagacaggctgaagcttctattcgatgacggcatatccgtagaagatgcttttttcgccgaatgtatgtcagacggactgccggctgacggggtcgtcaccggaatcggaactatcggcggcagaaccgtttgtgtgatggcaaacgactcaaccgtaaaggcgggttcatggggcgcgaaaacggtggaaaaaatcatccgcattcaggaaacggcggaaaagctgcagtgtccgcttctgtacttagtcgattcagcaggtgcgagaattacggatcaggtcgacatgttcccgggcaggaggggagccggacgcattttttataatcaagtaaagctgtcgggacgcattccgcaaatctgcttattgttcggtccttccgctgcgggcggcgcttacatcccggcattttgcgacatcgtcattatggttgaaggcaatgcatccatgtacttaggctctccgcgcatggcggaaatggtaatcggcgaaaaggtatcgcttgaagaaatgggcggcgcccgtatgcattgttccgtatcaggctgcggtgatcttctcgcccggacggaacaggaagcaattacgatggcgcagacatatctcagctattttccggcaaattatactgaaaaagcacccgtcaacacatccaagaatccgaaagcttttgaaaaaccgctctcagatgtcattccggcacatcaaaacgcgccgttcaacatgatggatttaattgaacgtgtcatcgatgaagactccttttttgagatcaaaccattatttgcgcaggaattaataacggggcttgcgcggattcacggacagccggtcggcattatcgccaaccagccgcgtgtcaaaggcggggttttatttctcgattcggcggacaaagccgcaaaattcatcgctttgtgcgacgcatttcatattccgcttctgtttttggcagacatccccggctttatgatcggaacgaaggttgagcaggcgggcatcatcagacatggcgcaaaaatgatctccgcaatggccgaagcgactgttccgaagctttccgttattgtcagaaaagcctacggtgccggattatatgcgatggcgggcccggcttttgaaccggattgctgcttagcgctgccgactgcgcaaattgccgttatggggcctgaggcagcggtgaatgcggtatatgcaaacaaaatcagcgaactcgctcctgaagaaagatcggcttttattcaagaaaagcgtgatgaatacaaggaagacatcaacctttaccgcctcgcctctgaaatggtgattgacggcatcgttcccgctgattccttgcgggaagaactcaataaacgcctcactgcttacatgtccaaacaactgacattcacacaccggaaacaccccgtatacccggtataaagaaaaaagaccgcatagatccggcccgcggccgttcttctatgcagtctttttttcatagtcttgatctcatctttttcacgacaaaataaacaacaataaatacaagagccaatataatgatcggagtcgtatacattccggcatagctgtctacatctttccactgtccgccgagctgatacccgagataaacgaaaatgatagaccacggaataatcgcaagcgtcgtcaaggtgacaaacttggaaagaggcattttcgcgagtccggcagggatggaaatcgcgtgtctgacgaccgggataaaccgtgccgagaataccacgcccgcgccgtaacggcgaaaccagttttccgcaacatcaatatgatgctttttcagcagtaagtacttgccgtacttgtccaaaaacggacgtcctccataacgggcgatccagtaaataaaacattgcgcgatcgttcccccgatgacaccggcgataatggcgccgataaaactgatcgtaccttctgacaccatatagcctccgtaagccagaacgatttcactcggaatgatttcgatcattaacccgagcgcaatccctaaatagcccatacttgtcagccaggataatatttcactaataaaattgcccacactgttcacaacctctttatctttttacccaattatatgactgattgacaagcaaaatggttacaaattattttttaatgcgtcatttcttcagattctctttttaacacctcttctaaataagctaaaagtttcggtctcatttctttccgcagaagcccgatctccgtcccggctttaaaacacccgagcttatcgcctatatcgaaccggcttccttcaagttcccgcgcgtaaatgctccgggtgcggcacactttgcgcagcgcatcagttaattggatttcgctgcccgcgcctcgtccgatcgttttgagcgcctggaaaatggcaggggttaatatgtatcggcccatcacggcaatacgtgagggcgccttttcagcagccggcttctcaatcaggtcttcaacctgatacacatgaccgctttgccgccccgtctgtataataccatatttgctgacatcagcaggctcgacgggctgtacgccgattgtttctgtgccgtgctggttatagacgtctatgagctgcgaaagcgcgggggtgtcagataccataatatcatctcctaagagaacggcaaaaggctcatctccgataaaatgctccgcacacaataccgcatgtcctaagccgagcggctctttctggcggatgtaatgaatattggccaaatcggcaatctgctgcatttccttaagcatctccgtcttgcctttttcctgcagattgaattccaattccgccaaccggtcaaaatgatcttcaatcgagcgtttgtttctccccgtaataatcagtatatcttcaattcctgattctgcggcctcttctacaatatattggattgccggtttgtcgacaatcggcagcatttctttcggctgcgcctttgtcgccggcagaaatctcgtgcctaaacccgctgcggggatgaccgcttttctcactttttttctcattcatcttcactcctgatcctgtatgtttttcagcgaatccccaaatacccagattcggtttccgataaaattcatcatcattccgccgatagtggcggcaagcttactcaccaaaagcgtacagccgcttttttgaaacgcgtaaagcaataaaaaggtgatcaccgacgcggcggcattaatcatgagaaagcgcacgatctctttcccgtcggccttgcgttttacacgaaacgtccagtttcggttccacacatagctgttgatgatccccgccgaataggaacagatctgagccggcagataagggacatggcaagcggtgagaaggaagaagacaccaaaatctattagcgtatttcccacgcccacggtgcaaaaacggcctaacgtctttattttttctttcagcataacggcacccggttttgacctcccttcataataaaatgcggatggctgtcatagttgttgatagggattactttagcggacagtgttgaataaacaattactaaaatatgaacaaaacatgaaaacgtaatgaggccttgccgttccattatgttaacagtttaatagttttggttgacatatttcgtgagggacactaatattctgtataagtgttaacctatatttattttggtttacattaattttcaaggtaagagaaagcaggggagagaatggaggaagagatatattacagcgtcagaatgagagcttcccgggacgcacctcatgagcagggaggaaaacacatttccggcggagaacggctcatcacttacagcggattacaagaagcggtgaatggcttattacataaaggcttctcgcattcaagagggacacctgattttatgcagatacagcttgaaagcatcaatcaaccgatcaaaacgatccgcccgttaccggttgccgtacatcaaacagatacggcagagaaaggacaagcagtcgcccggaagcttctgcaaaaagccgggattcctccgcacatgatagagaaagcctatcaaaatatcgcggaatatgcagaagtaagaggagcggtcctgttcgacattcagacgggaaaacgcattgacggcagaaaggaaagaggtgtacgggtatcccgcatggattggccggcacacgattttcaaaaatggactctcgagcacaaaatgccggaaaatccaagaataaaagaagcgcatgccatcgcggcaaaggtttgtgcgcatccgggcatcatagctgaactgtgctggtcggatgaccctgattacataacaggctacgttgccgcaaagaagctgggctatcagcggattaccaagatgaagaatgccggagatgaaagcggctgccggattttctttacagatggagccatagatacagagagctgtatacattttttagagaagcagcctgtattcattcagagggaggggaaaatatgaaacaatcaatgattgaaaaaagcaaaaagcatctttggctgcccttcacacaaatgaaagattacgatgaagatccgttaatcattgaaagcggaaacggaattatgctgaaagatacaagcggcaaagaatattatgacggcttttcttcagtatggctcaatgtacacggccaccgcaaaaaggaaatggatgaggcgattcaaaaacagcttgaaaaaatcgctcattctactttgctgggcatgacgaacgttcccgcaacagaacttgccgagatgctgacgagcatcacaccggaaaagctgacgcgcgttttttactctgacagcggagcggaagcgatggaaatcgctctgaaaatggcctttcaatactggaaaaacatagggcggcctgagaagcagacattcatttctatgcagaacggctatcacggcgacacgatcggagccgtcagcgtcggctctattgaacttttccatcatgtgtacggcccgctgatgtttgaaagctacaaagccccgattccttatgtatacagatctgaaaacggcgaccccgttcagtgccgggatgaatgtcttagcgcgctcgaacagctgcttgcggagcatcacgaagagattgcggcacttacgattgaatcgatggtgcagggggcatccggcatgatcgtcatgcctgaaggctttctggcaggcgtacgaaagctgtgtacggcatatgatgtgttaatgatcgttgacgaagtggcgacgggtttcggccgtaccggaaaaatgtttgcctgtgagcatgaaaatgtccagcctgatttgatggcggcagggaaaggaattaccggaggctatttgccgattgccgtgacgtttgccacagaagcgatttatgaagccttctacgatgactataacaaaatgaaaacatttttccacggtcactcctatacaggaaatcagcttggttgtgccgcggcaattgaaaatctgcgtttatttgaatcagagcgcatcgttgaacaggtcgccgaaaaatcaaaaacagcagcgatgtttcttcatgatctgaagcagcttcctcatgtcggcgatatccgtcagctcggtttgatgtgcggcatagagcttgtgcaggataaggagacgaaacagccttatccgcctgaaaagaggataggatacgaggtatctttaaaaatgagagagcttggtatgctgacgagaccgctcggagacgtaatcgcctttcttccgccgcttgccagcacagctgatcagttaaaagccatgatctccattatgaaagaagcgatagccgaggtgaccggccgtggattttgacggatggctcctcggaaggctcgatgcggtgaaaacagacgggctgtatcggacgctgcgaacacaggaaaccgctctcaaaaccaaggggcaaaagcggcagatctgggcgtctaatgactatttgggtctgtcaaaagacgaacggctgatcacagccgcgcaaacggcgctgagccgattcggggcaggaagcagcggctcacggttaaccaccggaaatacgctatggcacgaaaaacttgaaaaaacaatcgcggactttaaacagacggaagctgctttattgttttcaagcggttacttggcaaatatcggcgtgcttgcttcactgccgcaaaaaggcgatgtcattttaagcgatcaattgaaccatgcgagcattgtggacggctgccgtttatcaaaagcggaaaccattgtgtaccgacatattgatatggcagatctcgagaacaaacttgcctccgtccagtctcggaaccgccgctttatcgtcacggacggcgtattcagcatggacggcaccattgccccgcttgacagcataatggcgcttgcaaagaagtatcaggcatttgtaatagtagatgacgcgcatgcaaccggggtactcggggaaaacggcggaggaaccagtgaatattttggtgttaggcctgatgttgtcatcggcacattaagtaaagctgtcggaacggagggcggttttgccgcaggatcaaacattttcattgattttttgctgaatcatgcgcggacgtttatttttcagacggccgtcgcgccggcgatttgtgcggcttcgcatacggcatttgacatcataaagggcatgcacggtacacgccgtgtactgctgtcatctatcaaaacgataaaaacccgtctcgccgacatgggatttaccgtaagaggcggagatacaccgattctccccgtcatcatcggtgatgcaaaaacaacggtctcagccgctgcgttactggagaaaaaggggatctgcgcccctgccatccgcccgccagccgttccggatggtgaaagcagaatcaggctgaccgtcacggcggaccgcagcttacaggacatagatgagctgacagaagcatttgattccattagaaaagagctgaacatcaaccaatgagaagtttttttgtcacaggaacagataccggcgtcggaaaaaccatcgtctcttgcggacttgccgcggcattcaggcagagacaggcggatgtcggagtatttaagccgtttttaagcggagtgccgcggactcatccggaaagtgacacttctctgttgaaagatatgtcacaaaccgcactgtctcatgaagaaattacgccatttgaatggaaagagccgcttgcaccgtacacggccgccatgcttgagggaaaatccgtaagtatggaggaggtcacggttcactggaaaaagattaaaaatcgtcatgagtgtttcatcgtcgaaggagcaggcggcatttccgtaccgctcggtgaaaattacttagtcagtgatctgataaaagccctggaattgccggcggtgattgtggccaggcctgatctcggaaccatcaaccacacatatttaaccgttgaatatgcgaaaaacatgggaatagacattatcggcatcatcatcaacggcgtaaaaagccggccggggctggatgaaaagacaaacccgaacataattgaagcgctgtgcggagttccgattttaggaatcacaccgaagctggaacacgtttcagcggaaaacattcaacacatgattgagaaacatgtagatgtttctactttcatgaatctgacacaaatggggagataaacatgaatcaatggatggatcttgcagagagagtgctggacggggcggaagtaacgaatcaggaagcgcttgccattttaaattgtcctgatgatgatcttttattgctgatgcatgccgctttccatatcagaaaacgattttacggaaaaaaagtaaagctgaatatgattatgaatgctaaatcagggctgtgtccggaaaattgcgggtactgttcacaatcttcaatatcaaaagcgccgattgagtcttatcggatggtggataagcatatattgcttaagggggcaaaacgcgcccatgacctgaatataggaacatactgtatcgtcgccagcggacggggcccgtcaaacagagaagtagaccaagtggttgatgccgtcaaagaaattaaagaaacgtacggtttaaaaatttgcgcatgcctcggtctgctgaagccggaacaggcagagcggctgaaacaggcaggagtagaccggtacaatcataacatcaatacatcacaaaggaatcactcaaacattacaacctctcacacgtatgacgacagggttaatacggtggaaacggccaaacaatcggggatgtcgccttgttcgggtgtcatcgtcggcatgaaagagacgaaacaggatgtcgttgatatggcgaacagcttaaaagcgcttgacgccgacagcatccctgttaattttctgcatgcgattgacggaaccccgttagagggggtaagcgaattaaacccggtatattgcctgaaagtgctcgctttgttccgttttatcaatccggcaaaagaaatccgcatctcaggaggccgggaagtcaatcttcgttcactgcaaccgctcggtttgtacgcagcaaattccatattcatcggcgattacttaacaacctcagggcagcacgaaacagaggatcataaaatgctccatgatttagggtttgaagtcgaatccgttgaagaaatgaaagccgacttacaatccgcctgcaatacggagatataaaatgacggcgggcctatcgattgcacatccgtccctccatgcggattcagatttttggaataacccttatccgttttatgacaaactgcgggccgttgatcccgtgtatcaaggaaccgttttaaaatacccggggcgctacatcaccggatatcaagaagcggaagccgtcctgaaagacaccagatttaaaaaccgcattccgatgcctgaagcgtcagctaaatataaacacctgaaaaacttgcagaaggatatgctgctgtttacgaatcactcagaccataagcggcttcgcatgctgatcggcaaagcattcactctgaaaaaagcggagcggctgaaaccctttataacagcaacggttcatgatgtgttagaccaaatagatcacagtaaaaccgcagaccttgtatcagacttcgccttcccagtggcgagtctcgtcattgcggacatactcggggtgccgaaagaagacagagcaagcttcagggagtggaccgcggacgtcattcaggccattgacctgacacgctctaaaaagtcgctgcttaaagccggcggtacagccggcaagctgacggcgtattttaaagatttgattcaaaaacggaaaacagagccccaaaaagacgtcatcaccacacttatcagcgaagaacagcttacagaagaagaagtgctcgcatcctgcatcctgctcattatcgccggacacgaaacgacggtgaatctgatctgcaatggcgtgttttcattattgaaacatccggccgagctcagcaaattgctggaaaatccgcagctgattgcatctgcaactgaggaatttctacgctttgaaagcccggcgcagctgacggctcgtacagcttcagaagactgcgtcatcaatcagcacctcataaaaaaaggagagcaggtatatattctgttaggcgcagccaaccgcgacccggaggtatttcatcgtccccatcagctggacattacgagaaatcccaatccgcatctggcattcggaaaaggcgcccacgtctgtatcggctcctcattagcgcggattgaggcccaaacggccatcctcacactgctggagcgggcccctgatattcgccttgtgaaaacagatgttacataccgcaaactcttcggtttcaggtcgctttcagcgcttccggttgttctcagctgatgacattgcagaaggggcaggtttatcaagccccttctctaagatgaaacagttcctcttatcatgtaccggaaacatgtcacaacacacctgcactcaaacccttcaatataactgcaaccgcttacagatctgccgcctgacagtccttatgaagatataactgaaaggagaagtgaatatgggaaaagggaaaatcatggattcatttaaagaagccgcggagctgatcaatgacggtgacactcttattgcagggggcttcggtctttgcggcatccccgagcagttaattctcgccatcagagaccgggggacaaaaaacctgactgtcgtcagtaataactgcggcgttgacgactgggggctgggcctcttgcttgcgaaccgtcagattaaaaagatgatcgcttcctatgtcggagaaaacaaaacttttgaacggcaatttttaaacggagatctggaagttgagctggttccccaaggtacgctcgccgaacggattcgcgcgggaggagcgggtatcccggcgttttataccccggccggcgcggggacctcagtcgctgaaggaaaagagcagaaaacatttgacggacggacctgccttttggaaagaggcattaaaggacacgccagcattgtaaaagcgtggaaagctgatccgctcggcaatttgattttcagaaaaacggcaagaaattttaatccgctcgccgctatggcaggcagggtaaccattgccgaggcagaggaaatcgtcgaggcaggtgagcttgacccggatcacattcatacgccgggtatttttgtccagcatgtgctcaaaagcacgaatctcgaaaaaaggatcgaacgccgcaccgtccgggaagcatgaagaaaggagctgatcaaatgaaagatggcagaaaacgaatgatcgcacgggcagtaaaagaaattaaggacggaatgaatgtgaatttgggaatcggcatgccgacgcttgtcgcaaatgaaataccggaagattataacgtgctgcttcagtcggagaacggcttgctcggaatcggcccttatcctcttgcgggagcggaggacccggatctcattaacgccggcaaagaaaccatcaccgaagttaaaggagcctcttattttgacagtgccgaatcgtttgctatgattcgcgggggccatatagatgtcgccatcctcggcggcatggaagtatccgaaaaaggggacttggccaactggatgatacccggaaaaatgatcaaaggaatgggcggggctatggacttggttcacggagcaaaacggatcgttgtcattatggagcacgtaaataaattcggtgaatctaaggtgaaatcggaatgcactctgcctctgaccggcagacaagtcgtccatcggctgataacagatttggcggtgttcgaatttcaccaaggccgcatgatgctgacagaattgcaggaaggtgcgtcattagaggaagtcattgagaaaacagaaggccgtttcactgtcagtgaagcattaacgtccgggcggaaataaggaggcattttcatggacccattgctgaaagacaaagcggctgtagtgacaggagcagccagaggaatcggatttgaaatcgctcaagaattcacccgtgaaggagccgccgtaatcatagcggatgtcaatgaacaggcgggaaaagaagccgcagcaaaactcagtgaagaaggcgctcatgccaaaagcatcacgtgtgatgtaaccgatgaaaagcaaacggctgatatgattcaaaaagccgtgacagaattcgggcgactcgatattctcgtgaataacgcgggcattcagcatatcgcccccattgaggcatttcccgcggaacaatttgaacggctcatccgtgtcatgctgaccgcgccatttatcgccatgaaacatgcatttcccgtcatgaaaaaacagcaattcggacgaatcataaatatggcgtctgtcaacgggctcatcggtttttacggaaaagccgcatataacagcgccaagcatggcgtcatcggcttaacgaaagtcggcgcacttgaaggcgcggctgacggcatcaccgtcaatgccctctgtcctgggtatgttgacacacagctcgtccacaatcagctgaaggacatttctgacacaagaaatgtgccgtatgaacgtgttctggaggacgtcatctttccgctcgttccccaaaaacggctgctctcagtgaaggaaatcgctgattacgccgtgtttttggccagcgacaaagcaaaaggcgtcaccggtcaggccgtcgtcatggacggaggatataccgctcaatagttcgtttgaaaaaacagccgcactgaacggctgtttttttgtgccttaaaataaacatattgaaatcttccgaatggtgcttgatatcgccagcggccgcaaacaaacatgggcggatcattgggggcttcacaatgatttatgtctgttcaaccccgctcccgtgacctgattttcagtttggctgaagagacgaataccgacgcgatgaaaaaacggaatttatgataaagcggtttcgtgagaaacaagatgacaacatatgacggttttcacaaggaatttacgaaataacgataagcagaagaaatagccggaattcaatagattgataagttccgcgtcatgattccatatgagcctccagcaagactcaaccaaaaacattttgcttctaccgataaattcctcttatgatgaagcagctcgtattcagctgtgtgatgggccgatttactgcggcaatcggtatccgggcaggtcatccatatattctgcatcgcgttttatctttacagattttcctcatccagatccattccttgcgcatcaaagcgcatcagtttacaatccttcacagatatacaaatgaatgtttacaataaacataaaatatgtaatttctgacacaattatgccaatagacctaaaaaataagcagcatcaagggcgtgcactaagtgaagaagagtcggtaaccggcttccattccggctcttatcacctctttttaagactgttttttcagtgtcagccccaacttatattttatgaataattgtaaccggttcgtttgtaaaatcgaacaataactcctccgaaagtattctatacacctttgttataatcatgctaggatgttagataaagggatatattgtatgatattggatctcgatgcgatcggagggaactcatgaacaatcttgcctttttatttcctggacaagggtctcaatttgtaggaatgggcaaacatttttggaatgaatttgcgcttgcaaagagattatttgaagaagcgagcgatgcgatctccttggatataaaaaagctgtgctttaacggtgatatgaatgaattgacaaagacaatgaatgcgcagcccgctattttaacagtcagtgtgattgcttttcaagtgtatatgcaggaaataggggttaaaccgcgctttcttgcaggtcatagcttaggagaatactcagcgctcgtctgtagcggggccctttcttttcatgatgccgttacacttgtaaggcggcggggtattcttatgcaaaatgcggatcctcagcagcaggggacaatggccgccgtgacgcatctctctctccaaacattacaagaaatatgttcgaaagtgtcgacggaagactttccggcaggtgtagcctgtatgaattcagatcagcagcatgtgatttccggacaccggcaagctgtggaacgtgtcatcaggatggctgaggaaaagggagctgaatacacttatttgaatgtcagtgcgccttttcacagtctgatgatacgatcggcatccgaacaattccagaccgtactacaccagtattcctttcgggatgccgcatggccgattatttcgaatgtcaccgcacggccttacagcaccggcaattcggtcaacgaacatctcaagcagcacatgacgatgccggtaagatgggcggaatcaatgcattacttgcttttacacggagtcacggaagttatcgaaatgggcccgaagaatgttttaggcagtctgctgaaaaaaataacgaatcatattgctccttaccctttaggacagacatctgatgttcaccggctgtcgaattcaggggaaagaaataaaaatattgtccatttacgcaaaaaacaactgaataaattgatgattcaatccgtcatttcgcgaaattacaacaaagattcattggcttattccaacatgacgacgcgattatttacgcaaatccaagagctgaaaaagagaatggaaagaaatgaagatgagctttcagaacaagagctcgaacattcaatccatttgtgcaaattaatttgcgaggctaaacagcttccggctcaggaacaattacggattttaaaataaagcgcccaggaggggacctatgtataccagtcaattccaaaccttagtcgatgtcattcgggaaagaagcaatatttctgatcgcggaatccgttttatcgaatccgataaaaacgagacagttgtctcttatcgccaattgtttgaagaggcgcaagggtttcttggctatttacagcatatcggcattcagccgaagcaggaaattgtatttcaaatccaggaaaacaaatcatttgtcgttgctttttgggcttgtttattaggaggaatgatcccggttccggtcagtatcggagaagatgatgaccataagctgaaggtctggcggatttggaatatattaaatcatccgtttctgattgcctctgaaaaagtattggacaaaataaagaaatacgctgcagaacacgatttacaggatttccatcatcaattaaacgagaaatctgacattattcaagatcaaacctacgattaccccgcttcgttttatgaacctgatgcggatgaactggcttttatccaattttcttcaggatcgacaggagatccaaaaggagtcatgttaacgcatcataacttaatacataatacgtgcgccattcgaaatgctctgtccattgactcaaaagactctttcttatcttggatgcccttaacgcatgatatggggctcatcgcctgccacctagttcccttcatagtcggaatcaatcaaaatctaatgcctacagaattatttattcgcagacctattctttggatgaaaaaagctcatgaacataaagccagtattctatcctctcctaatttcggatacaactacttccttaaatttttgaaaaacgaaccagactgggatttatcccacatcagagtcatcgcaaacggtgcagaaccgatattgccggagctctgtgacgaatttttaacaagatgcgcagcattcaatatgaaaagatcggccattttgaatgtttacggtttagcggaagcttcggtcggcgcagcgttctctaaaacaggagaagaattcgttcccgtttatctgcatcgcgactatttaaacctcggtgaaagagctgtaaaagtcagcaaagaggatcaaaattgcgcttcattcgtcgaagtgggacagcctattgactattgtcagattcgaatctccgacggagaaaatgaaagaatagaagacggaatcatcggccatatccagatcaaaggagacaacgtgactcaagggtattataacaaccccgaaagtacggacagagcgctgacttctgacggctggataaaaacgggagacctcggattcattagtgaaagtggcaacttagtcgtaaccggaagagaaaaggacattattttcgtgaacggaaaaaatatctaccctcacgatattgaacgggttgcgattgaaatggaagaggttgacttaggaagggttgccgcctgcggtgtatatgatcaaaatacgcgaagcggagaaatcgtgctctttgttgttttcaaaaaatcacctgaaaaatttgcgccgcttgtcaaagagattaaaaagcatttgtaccagcggggcggctggagcataaaagaagtccttccgatccgcaagcttccaaaaacaaccagcggaaaagtgaagcgatatgaactggccagacagtacgaagcaggggaattctcggtagagtctgccgccatcaatgaatttttagagggcagcccggaaaaatcaggacagactccgattcatgagatagaaacggaattgctgtctatcttttccgaagtactggccgggaaaaaggttcaccttactgatagttattttgatatgggcgcaaattctttacagttatcgcagattgccgagcgcatagaacagaaattcggacgcgagcttgccgtttccgacctctttacgtatccttctatcactgatttagcggcatatctgtctgaaggccgtgctgaaatcaagcctgatgtgacagcggagccaaaccatgtttctccgaaagatatcgccattatcgggatgtcgctcaatgttccgggagcatcgactaaaagtgatttttggaatctccttgaaaaaggggagcacagcattcgagaataccctgtatctcggatgaaagatgcggcggattatgtaaaggccatccaaagtgatttcaatgagaatcagtttgtgaagggcggctatttagatgaaatcgaccgatttgattattcgttcttcgggttagctcctaaaacggctcagtttatggaccctaatcaaagactgtttttacagtctgcatggcatgcgattgaagatgcgggctatgccggcgacagtatgaacgggagtcaggtcggggtatatgcagggtattcgaaggtgggctacgattatgaacgcctcctttctgcgagttacccggaggaacttcatcaatatattgtaggcaatcttccttccgtgttagccagccgaatcgcttatttcttaaatttaaaagggccggcggtcacagtggatacggcctgctcttcatcgcttgccgccgttcatatggcatgcaaatctatcatttccggcgaatgtgaaatggctattgccggaggtgtccgaacatcgctcctgccgatctgtatcgggcttgatatggaatcttcggacgggtacaccaaaacgttcagcaaagattcagacggcacgggcacaggagaaggggcggctgcagtcctgttaaaacctttgcaggatgcggttcgcgacggagaccatatttacggtgtgatcaagggaagcgcgatgaatcaagacggaacaactgccggcattaccgccccgaatccggcagctcagactgaggtcattgagacggcttggaaagacgcgggtgttgctcctgaaacgctgtctttcatcgaagcgcacggcaccgggaccaaactcggcgatccggttgaatttaacggactttgtaaagcgtttgaaaagcatacgtcaaaaaaacaattttgtgcgattggttctgttaaatcaaacatcggtcatttgtttgaagcggcaggcatcgtggggctgatcaaatctgtcctcatgctgaatcataagaaaaacccgccgttagcgcactttaatgaacctaatccgctcattcactttcactcttcacctttttatgtaaatcaggaagctgcggagttcacacctggtgacgggcctctgcggggcggaatcagctcgtttggttttagcggaacgaatgcgcatgtggtgttggaggaatatactgcccaaaatgagtatgctcccgaggacgaaaatgagccgcacctatttgttttgtctgctcaaacagaaaattcactctatgagctcgtacaacagtaccggcaatatgtatcgaatgacagccaagcctcattgaagtccatttgctatacagccagtacgggcagggctcatttggatcataggattgccatgattgtatcaagtaaacaagagttatctgataagctgacctgtctggttcagggagacagaaatatccccggagcatacgttggttatcagaatatgaaggaaatgctgcctgctcataaagaagagctgaataaacaaaccgctgatctgatcaagcggagtacacatacacaggatgaacgaaacacacggctgaatcgcgccgccgaattatttgtgaaaggagccgttatagattggcgcgcgttttattccggggaaaccgtacaaaaaacgccattgcctttgtatccgtttgaacggaatcgctgttgggctgaagctgcccctttgagcgtaaacgagggagaagagagaggagaagcagtattgaatatcaatcaatcgaaggcgcatattgaatccttcctgaaaactgtaatcagtaatgcttcggggatcagagcggatgaaatcgatctgaatgcccattttatcggactcggaatggattccatcatgctgtcacaggtcaaaaaggccattgcggacgaatttggggaagacatcccgatggatcgtttttttgatacgatgaacaaccttcaaagtgtcatagattacttggctgagaccgctccaacatcctttgcatccgctccgcctcaagaaaatgttccggcgcgagaaaaaccggtcatttcagaagcacagcctgagtcggagcacagagaagaccgccaagagcatatgctcgaaaaaataatcgcttctcagaatcaattaattcaggataccttacaggctcaattaaatagctttaatttactgagaaccagcgggcatcattccgatgtgaaagaatactctaaagcgcaaaaaaaatcaatttcttcagtcgagcaggggcctcctgctgctgccggagaaaagaaattgactcaagaagcgaaaccctatgttccttttcagcctcagagcctgcatgaacagggacactataccgcacagcaaagacaatatttagaagatttcatcaggaaatacgcagacaaaacgaaaggttccaaacaatatacggacaaaacacgatttgctcatgcaaacaaccgtaatctgtccagcttccgttcatattggaaggaaatcgtgtacccgattattgccgaacgttctgacggttccaagatgtgggatattgacggaaacgaatatatcgatatcaccatgggattcggagttaatcttttcggacatcatccatcgtttattacacaggtgatcgatgattcaacccgctcatccttgccaccgctcggaccgatgtcggatgtcgccggggaagttgccgaccgaatccgcacatgcactggcgtagaaagggtcgctttctataattccggaacagaggccgtcatggttgccctacgtttggcaagggcggcaacaggaagaaagaaagttgtggcgttctcgggctcttatcacgggacgtttgacggcgtattgggagttgcgagcacaaaaggcggggctgcgtctgcgaatccgctggctccgggcatactgcagagctttatggatgatttgattattttgcattacaacaatccagattcgctggacgtgattcgcagtctcggggatgaattggccgccgtactggtggaaccggtacaaagccgcagaccggatttgcagccgaaagcatttctgaaagaactgcgggcgattacacagcaatccgggacggctctgattatggatgaaattattacgggatttcggatcggtctcggcggcgcgcaggaatggtttggcattcaagccgatttagtgacctacggaaaaatcatcggaggcggacagccgttagggattgttgccggaaaagctgagttcatgaatgcgatcgatgggggaacctggcagtatggggatgattcctatccgcaagacgaggcgaaacgcacctttgtggccggcaccttcaatactcacccgcttaccatgagaatgtcattagccgtgcttcgccatttacaaaccgagggagaacacctgtatgagcagttaaatcaaaaaacagcctatctggtcgatcagctaaatcgctgctttgaacaatcagaagtgcctatccgcatggttcgattcggttctttattccggtttgtttcatcgcttgataacgacttgttcttttaccacctcaatcataaagggatctatgtatgggaaggacgcaactgcttcttgtccacggcgcataccgcggatgatattgaaaacatcattcaagccgttaaagacacggtgaaggatcttcgccgaggcggatttattccgggtggcccggattcccctgatgacggaggccataacaaaaccggaatacacgagctttcacctgaacaaaaacaattggttctggcatcacattatgggaatgaagcttctgcagccttaaaccagtccattatgctgaaagtgaaggggaaactgcagcatacgcccttaaaacaagcagtccggcatatcgtcggccgccacgaggctttacgtacggtgatccatgttgatgacgaagtacagcaagtgcaggagcggataaatgtagaaattcctgtcattgattttaccggttacccggaagagcaacgggagccggaaattcagaaatggctgcaagaagatgccaagcggccgtttcatttccaagaacaaaagcctttgtttagaatccatgtgcttacatcgtctcaagacgaacatctgattgtgcttacattccatcatatcattgccgacggatggtcaattgctgtctttgttcaagagctggagagcagctatgcggcaatggcagaaggaaaaccgattcccccgaaagcagccgctgcttcatttcgccaatatttagactggcagcaggcacagattgacagcggccattatgaagaaggagtccgttattggcgtcaccatttctctgaaccgatacagcagacagtcctgccgagcatcgcttctgcccgttttccgaacgggtatgagggtgaccggttcaccgtcaggcttgggcggcctttaagcgaggctttaaagtcattaagcattcggaggaaaaatagcgtatttgtgacgatgctgggtgcatttcatctttttctgcaccagcttaccaaacagtccggtcttgtggtcggaattcctacagccggtcagtcgcatatgaaacagcatgatctgattggaaattgcgtcaatatgattccggtgaagaacacatcttcttcagaaagcaccttatccggttatcttggcagtatgaaagaaagcgtgaaccatgcaatgcttcatcaggccgttccgatgacactgatagccagagaacttccccacgatcaagtgccggaaatgcgtattatttttaatttggacaggccttttcgaaagctacatttcggaaaggcggaagccgagctcgttgcttaccctatgaaatgcatttcatatgatctatttctgaatgctacggatgtgggccaagaatatgttcttgatttcgactttaatacgaatgtcatcagtccggagatcatgaaaaagtggggagcaggctttacgaaattactgcaaaaaatggtcgagggggattcagtccctcttgacgccctgacgatgttctccgatgaagaacagcatgatttacaacagctgtatgccgaccatcaaaatcggatctcttcaatagtcagcaatacggcaaccttcgctgacgcctacgaggcgccggcaaatgaaacggagcggcagctggcgcagatgtgggaggaacttttcggccttgaacgggttggcagatcagatcgcttcctggcattgggaggaaactcactccaagcgacgcttatgctttccaaagttcagaagacatttcatcaaaaggtttccatcggacaatttttcaatcaccagactgttaaggaattagcaagtttcattcagaatgaaaagaaagtcatgcacttcccgatgaaggcggctgagaaaaaagcgcattacccggcatcaccggcgcagcaaagagtatatttccttcaccaaatggaaccggatcagctggttcagaatatgttcggccaaatatcaattatagggcaatacgatgagcaagccctgatttcttctcttcagcaagtcatgcagcggcatgaagcgtttcgcacgtattttgacatttcagatggcgaaattgtccagaaacttgaaaacgaaattgatattaacattcatgtccggacaatgagccgggacgaatttgatgcctatgctgaccggtttgtaaaaccgttccgcttggaccaagctcctttggtccgtgcggagctgatcaaaattgataacgggcaggccgagctgctcatcgatatgcaccatatcatttcggacggttattccatcaacatacttacaaatgaattgctggccttatatcatcagaaaccattaccggacattgaatttgaatataaagatttcgcagaatggcagaaccaatggctgaatgaggatgccatgaagcagcaggagacatactggcttgaacaatttcaagaagaaatcccagttcttcaactgccgacagacggttcaaaagcggcggaacggtcttccgacgggcagcgcgtaacgtgctccttacagccggatgtaatccgttcgctgcaagatctggcgcaaaaggcgggaacgacgctttatacggtgcttctggccgcctacaaagtgctgcttcataaatatacaggacaagaagatattgtcgtaggcacgcctgcttcaggaagaaatcatccggatgtcgaaaatatcatcgggattttcattcaaaccatcggaatccggacgaagccgctcgccaatagaaagtttacggattatctggaagaagtaaagcggcagacgcttgacgctttcgaaaaccaagactatccattcgaccggctggtggaaaaattaaatgtacagcgggaaacaacaggcaaatcactgtttaacacaatgtttgtgtttcaaaatattgaatttcatgaaatccggcacgatgaatgtacatttaaggtgaaagaacgaaatccaggggtctctttatatgatttgatgctgacggttgaagatgccgggcaacagatcgagatgcactttgattttaaaccggggcagtttgaaaaagacaccattgaacagatcacaaaacactatgtcagtattttaaagagccttgtgaagcagccggagatgacgttgtcttccgttcctatgctgtctgaaaccgaacggtatcaattgctgacggagtttaatgacacaaagactccgtatccgcataacgaaacggtatcccggtggtttgaaaaccaggcaaacctgcggcctgatcatgaagccgttattttcggcaatgagcggtatacgtacagacagctcaatgaacgggcaaaccaattggcgcggacgttacggacaaaaggcatacaagcggatcaattcgttgccatcatctctccgcattgtatcgagctgattgttggaattttggctgttctgaaatccggcggcgcatacgtgcccattgatcctgaatatccggaggaccggatccattatatgctgagtgactcaaaagcggagattgtgttgacacaccgcagcctgcaagctcaattaccgtatgatggcgacgttgtgcttctggatgaggaaaactcttatcatgcagaccgctcaaatcttgaattgttcagcgatgcgcatgatttagcctacatgatctatacgtcgggttcgaccggcaatccgaaaggtgtactcattgagcaccaggggctggccaattatatttggtgggcgaaagaagtttatgtgcagggagagaaaaccaacttcccattatactcttcgatctcttttgatctgacggtgacttcaatatttacaccgctggtgacgggaaataccatcatcgtctatgacggagaagataaaagcgctgttctttccgcgattatgcaggactcaagaatagacatgatcaaattaaccccggcacatttgcacgtcatcaaggagatgaatatagcagatgacaccacaatacggaaaatgattgtgggcggagaaaatttaagcacccgtctggccaaaagtgtcagcgagcagtttaaaggacggctggacatattcaatgagtacggaccgacggaaactgtcgtcggatgtatgatttaccgttacgacgcaaaacgggacaagcgggaatttgtaccgatcggcactgcggctgccaacacggacatttatgtggctgatgcaagcagaaatctggttccgatcggggtaatcggtgaaatgtatatcagcggacccggtgttgccagagggtattggaatcgcccggatttaacggcagaaaaatttgttgaaaacctgtttatcccgggagcgaagatgtacaaatcaggggacttggctaagcgattgagggatggaaatcttgtatatgtgggccgcatcgatgaacaagtcaagatcaggggacaccgaatcgaacttggcgagatcgaagcagcgatgcataacgtggaagcggtgcaaaaagccgcggttacagccagagaagcagaagacggcttaaaacaattgtgcgcgtattacgtaagcgacaaacctatagcggctgcgcagcttagggaacaattgtcatcggagctcccgaactacatggttccgtcctattttgtccgtctggagcatatgccgttaacgtccaacgggaaaataaaccgtaaagcactgcctgcacccgaagcaagtctgcagcagacagctgaatatgttccgccgggcaatgaggtcgagtccaaactgacagatttgtggcaggaagtgctcgggataagccgtgcggggatcaaacataatttctttgatctcggaggaaattccattcgtgcggcggccttagccgcacgaattcataaagagctggatgtgaacctgtcgctaaaagacatattcaagtttcctaccattgaacaattggctgacaaagcgttacacatggacaaaaatcaatatgtaccgatcccggccgcaaaggaaatgccctattatccggtttcttcagctcaaaggcgcatgtatttgttaagtcacgcagaaggcggcgagctgacttacaatatgacgggtgccatgagtgtggaagggacgatcgatcccgaccggttaaacaccgctttccaaaaattaatcgaacgtcatgaagctttgcggaccagctttgaattatacgaaggcgaaccggcacagcgtattcatcagaacgtcgaatttacaatagaacgaattcaagctggcgaagaagaagcgaaagaccgtgtgattgatttcattcaagcgtttgatttagctaagccgccgctgatgcgggccggtctgattgaagttgaacctgcgcggcatgtgcttgtggttgatatgcatcatatcatttctgacggtgtgtcggtgaatattctgatgaaggatttaagcctgctttacgcggggaacgaaccggagccgctttctgttcaatataaagactatgcggtttggcagcaatctgacattcagaaacggaatatcgagagccaggaagcgtactggctggatcagtttcgtgatgacattcctgtactggaaatgcctgcggattacgagagacctgatatacgcgattacgaaggagaatcctttgaatttgttataccggaacacttgaaacagcgtttaagccaacttgaagaaaacacaggagcaacactgtatatgattttattggcagcctatacgattcttttatccaaatacagcggacaagaggatattgtcgtaggaacgccatctgccgggcggactcatttggatgtagagtcagtcgtgggaatgttcgtcaatacgttagtcattcgcaatcacccggcgggccgtaaaacatttgatgcctacttaaacgaagtaaaggaaaacatgctgaatgcctataaaaatcaagactatccgttggaagaattgattcagcacttgcatttcccaaaagattcaagccgcaatcctttgttcgatacgatgtttgtgctgcaaaatctcgatcaggctgaattgacattcgattcccttcagctcaagccgtatcaatttcatcatccggttgccaaattcgatctgaccttgtcgattcaggcggaccaggacaactatcacggtctgtttgaatattctaaaaagctgtttaaaaaaagcagaatcgaggctttatcaaacgactacttacacatcctatcagcgattctagaacaaccgaacataacaatcgaatatatcgggttgagcggcggcgatgaggaagaagagaacatgctggattctattcaattgaacttttaggaaaagcatttatttagttccttaaattatacaaaacgaggtgctccaatgtcggtatttagaaatcaagaaacgtactgggataacctgtttgatgaagatgacggcctaagcgtattcccttacttcaaagcagaggataatgcgtcattggcccgtatcggctatcaggaaaaatgcatctgccgttccttatctccggaagtatctcagagaatcatgacaatggcgaatcattccgaaatggcagcctatttgattttattggctggtattgaatgcttgctgtataaatatacggatcgagcgagtttgattctcggcattccaacggtatcgaagcaaaaaagcagccagtcagccgttaataccatcgtcctcttaaaaaatacgcttacaagcgaaagcacgttcaaaagcgtattccagcaactgaaagaagccgttaatgattcgctgaaaaatcaaaacctgccgttccggaaaatggttcagaatctaaacgtgcaatacaatgatgagcatattccgttcattcataccgtcgtttcgcttaacgaaattcattccttaaaatttaaggaagacgctgcaaccgatacgctgtttcactttgatatggagaacaacggggttcacttgaagcttttttataacggcaatctgtacgatgagcgctatatggatcaaattgcagcccatttggatcagctgctgtccgtgatcttgtttcagcctcaaactgcaatccatacggcagaaatgatacccgagacggaaaaacagaaactattgtttgatttcaatgacaccggcgcagattactccgggagcagaaccgtttatcaattatttgaagagcaggcagaaagaacgcccgagcatccagccgtgaagtttaaaaactgccatttgacgtacagagaattgaatgaaagagccaaccgtttggcaagaacattgcgcaactgcggggttcaagccgattcgttggtcgctattctggctgatcgttcattggagatgatcgtgtctattatagccgtttggaaagcggggggcgcttatgtgcccctggaccctgaatatccaaatgagcggcttcaatatttgcttcatgatgcgaatgcagatgttctccttgtacagcatcattttaaaaacagcctcacctttgacggtccgacgattgatctgaatgatgaaacatcttaccatgccgattgctcattgttatcacctatagccgaacacagccatttagcctatgtcatctatacttcaggcacaacaggaaagccgaaaggggttatggttgaacacggcggcattgcgaactcgctgcagtggaagaaggcgttttttaagcattctgccaaggaccgtgtgcttgtcttgtacccctatgtttttgatgcatttattttaaatttcttcggcccgcttatttcgggggcaaccttgcatcttttgccgaatgaagagaataaagaccttttcgccattcaaaatgtcatgaaacaggagagaattacacatttctcaacttctccccgtcttctgaaaacgatgatcgaacagatgaacgcagaggacttcattgatgtccagcatgttgttgtaggcggagagcagctggaaacagatacagttgagaagctgtattctctgcagcctcatattcgaatcaataatgaatacggaccgacagaaaatagcgtggtttctacgtttcaccctgttcagtccgctgatgaacagatcacaatcggcaaaccggtggctaaccatcaagcctatattttaggagcgcaccagcaaatccagccgatcggcgtaccgggagagctgtatgtcggaggagcgggagtggcccgcggctacctcaatcggcctgaattgacggaggaaaagtttgttcagcatttgcatctccccgctcaaaagatgtacaaaacgggtgatctcgcaagatggctgccagatggaaggatcgaatatttaggacgaattgatcaccaagtgaaaattcgcggctaccggattgagatcggcgaggcagaggcagccatgttcaatctggagaacgttcgtgaagctgcagtcgttgcgcgggaagacgaagacggagccaggcaattgtatgcctattatgtcggcgagccttctttgaccgccgcgcagttcagagacgaattatcccgtaaactgccggattatatgattccctcttactttatccatttggaacacataccgctcacttccaatggaaagattgatttgaaagctttgcctgctgccgaagaaaaaacgcggacggaaaatgaatacatagccccgcgaaacacaacagaagaactgctggtgtctatctggcaggaagtattgggggcagaacgtataggaattctggataatttctttgattttggcggagattcgattaaatcaattcaggtgtcttccagattgtatcaagccggatacaaggttgatatgaacaatttgtttaaatatcccgcgattgctgaactaagtccgtttgtagtgccggtcagcagaatggccgatcaaggggaagtgagcggcaggacaaatctgactccgattcagcattggttttttgagcaaaaaatgccgcatgcacaccattacaatcaggccgtcatgttatattcggcggaaggctttaaagaggatccgcttcgccggacgatggaaagcatcgcatcgcatcacgatgccttaaggatgatttttgaagaaacgccgaatggatacaccgcgcgaatcacaggaacggatgaacatgaattataccatctggaagtgttgaattataaagaggtaacagatccggctcaagcaattgccgaaaaagcgaatgagattcaaagcagcatggtattagagcaggggcctttaatgaagcttggtttgttccaatgtccggacggagatcatttgctgattgcgattcaccacttggtgattgacggggtatcatggcgaattttacttgaggattttgcaagcggttatgagcaggcagagcaagggcaaacgatccgccttccgcaaaaaacagactcctttccattctgggctgatcaattgtccaaatatgcgaaggaaaccgacttggagcaggagattgcctattggtccgagctttcaagcacgaagccgcagccattgcctaaggacaaaataagcgaaggttcgttattaagagacagcgaagaattgacgattcaatggacaaaagaggaaacagagcaattattaaaacaagcgaaccgcgcatacaacacggaaatcaatgatctgctgctgacttcattaggactcgccgttcacaggtggactggcatggaagacattgtcgtaaatttggaaggccacgggagagaaccgattattccggatgcggatatttcccggacgataggatggtttacaagccagtaccctgtcgtactgaggatggaagccggcaaagacctgtcacagcgaattaaggccgtgaaggaagggctgcgccgtatccctgataaaggaatgaattacagcatcattaaatatgtatccgggcgtccggaagcggaaacccttcagctgaatccggaaatatcgtttaattacttagggcaatttgaccaaaatctgaagcatcaagctttgcgcatatcgcctttttccactgggttatcgatgaatgaaaaccaagagagactggccgtgcttgatgtaagcggcatgatagctgaagggaaattatcgctgacactgagctacagcagcaaacaatacgaaaaatcgactatggcgcaatttgcccgaagtttgaaagaaagtctgcaagaagtcattgcgcattgcgtaagccggcagcagacttccctgacgccgagtgacatcctgttaaagaacatcacaatagatgaactggaacaacttttggagcagacacgtgaattgggcgaagcggaaaatatttatccgctaacaccgatgcagaagggtatgctgtttcacagcttgtttgacccgagttcaggcgcttattttcagcaaacgatgtttgatctgcatggagatctggatattgattcattttcgaaaagcttggacggcttatcgcaaaaatacgatatttttcgcacgaacttttacagaggctggaaagatcagccgctgcaaatcatcttaaaaacgaaaaagatcggttttcaattcattgacttacgtgagatgaaaaaatcacaaaaagaagagatgattcagaaatacgccagagaagataagttacaggggttcgacttagagaaaggcgagttaatgcggttactcattcttcgtacggatgatacggcataccgttttatatggagttttcaccatattttgatggacggctggtgcctgccgctgatcacaaaagaaatattcgaacattactttgctttgcttcagcaaaagcagcctgagcaatcgtcaattactccctacagtcgattcattgaatggctcggccggcaagatgcagaagaggccatgcgttattgggatcagtatttagagggatatgaagagcaaaccggccttcccaaggatcaccattcggcggatgaacgatacattctcgagaaagtgacgtgtgaaataagctctgatctcactttgaaaatgaagcagacggccggcaagcgccacgtcacgctgaatacgctgctgcagacggcttgggcggttctgctgcagaaatataaccggagtaaagacgttgtttttggaagtgtcgtttccggaagaccggctggaattccaaacgtggaaaccatgatcggcttattcattaacaccattcccgtccgaatccgatgtgaagccggaacaacgtttgccgagcttatgaaagaggcgcaggaaagggcagtagcgtcgcaaaaatttgagacgcacccgttgtacgatattcaggcgcggacaacgcaaaagcaagatttaattacacatttaatgatattcgaaaattatcccgttgatcagtatatggaaagcataggccggcaaaacggatcatccatcaccatttccaacgtgcaaatggaagaacagacgaactatgattttaatttgaccgttataccgggtgacgcgatgaacatctattttgaatacaacgccaatgtgtatgatcgatcaagtatagaacggattcgggagcatttcatgcaaattttgcatcaagtcgtgacagatgcggatatcctggtggagcaagtggaattgttaacggaaggtgaaaaaagaacccttcttcatacgcttaacgacacgtctgcgccatttccgcaaataccggtttatcaattatttgaagagcaatcacagcgcacgcccgatcaagcggccgtgatcgataaggacaggcagctcacgtacggagagctcaataagcgggcaaaccaattggcgagaacgttaagagcgaagggcgtgcaggcggatcatcctgtggctgtcatcagccgaaacagtatcgaatcggtggtcggaatccttgccgttttaaaatcaggcggagcctacgtccctatcgatccggaatatccgcaagaccgaattcggtatatgctggatgactctcaagccgaaatcattttgatgcagcgggatgtcagggagcagctctcctgcgaaggcgtcacggttttactggatgatgaaagttcgtatcaccaagatgacgctgaccttgaaccgctaagtgatgcgagccatttggcgtatgtcatttatacgtcaggttccacaggccggccgaaaggcgtattaatcgagcaccggggcttggccaattatatttggtgggcgaaagaggtttatgtaaaaggcgagaaaaccaacttcccgttgtattcgtcaatctcttttgatctgacggtgacttctatcttcacaccgctagtcacgggcaatacgatcatcgtctacgacggtgaggataaaacagcactgattgcatcaattgtgcaggacccgagggtggatatcattaaattgaccccggcccatttgcaggttttaaaagaaatgaacctcgccgataaaacggctgtccgaagaatgattgtgggcggggagaatctaagcacccggttagcccaaagtattcatgaacagttcgaaggccggattgaaatatgcaatgagtacgggccgactgaaaccgttgtcggctgcatgatttaccgttacgatgccgtaaaggacaggcgggaatcggtaccgatcggaaccgctgcagcaaacatgagcatttatgtccttgatgagaataggaaacccgtgccggtcggtgtccctggggaaatctatatcagcggcgccggcgtggcaagaggatatttaaaccggccggaattaacggcagagaaatttgtcgatgacccgtttgaacccggagccaagatgtataagaccggagatttggcgaagtggctggccgacggaaacatcgaatatacggggagaatagatgaacaagtaaaaatcagaggctatcgtatcgaattaggagaaatcgaggcggcactgcaccaagaagaagcaatcaaagaagcggtcgtgacagccagagaagatgtccacgggttcaaacaattgtgtgcatattacgtgagctgcggacaaataacggtatccaagcttcgaaaacaattgtctcaaaccctggcaagttatatgattccggcttattttatcgagatggatgaaatgcctttaacctccaacggaaaaataaacagaaaagggctgccggctccggatttcgggctgcaggacagagcagagtataaggctccccgaacgaaagcggaagaaatattagtttccgtctgggaatcggtattaggcgcagagaacgtcggtattctggataatttctttgatctcggcggagattcgattaaatcaattcaagtgtcatccagattaaaacagagcggatacaaaatggaaatcaaagacttgtttcaatatgcaacgattgccgaattgagtccgcatatcaagcagaatgtacgtatagccgatcagggtgaagtcaaaggaaaagtcagcctgactcctattcagcattggttctttgatcacataacggtagatccgcattattataatcaagccgtcatgctgtttgcgccggaaggttttcaggaaacgccgcttcgtcaaaccctgcaaaagctcgctgaacatcacgacgcgcttcgcatgacgttccggcagacagaaaaaggatacgaggcacaaaatgcagagatcggccaaagcaggctgtaccaccttgaagtcctgaatctgaaagcagagtccgacccggggcagataattgaggccaaggctgacgagatacaaggcagtatgcgtttaagtgacgggccgttaatgaaagccgggctgtttcaatgtgcagatggagatcatttactgattgccattcatcatttgattgtagacggggtttcatggcgcattttattggaggatatcgtcagcggctacaggcaagctgagaacgggcaagtggttcaactgccgcaaaaaacagactctttccaattatgggccaagagactttcagaatatgcgcaaagtgaaacgataaaacaagaacaggagtattggacaaagatcgaacaaaccgaagtaaaaccgctgcctacagattttcatgaaacacagactactgcaaaagacagtgaaacggcagctgtggaatggactaaagaggaaacggagctgttattaaaacaagcgaatcgcgcctataacactgaaataaacgatttgcttttaacttcccttggtctttccatatcacactggtcaggacttgaacacattccgattcatttagagggacacggaagagaacagatttttcaagatatggatatctcccgcacggttggatggtttacaagcctgtatccggttgtgcttcacgcgcagccaggcaaagaaatctctgattatatcaagatgaccaaagaagggctgcgccaaattccggataaagggatcggatatgggatagcaaggtacttaagcggcgggatgccatcaaaactgaatccggagattagttttaactacctggggcagtttgaccaagatttgcagcagcatagggttcaattatcttcttactcctgcggttcagactcaagcgggaatcaagccagaccatatgtattgaatataaacggaatgataaccgacggccggctgacgcttacgatcagctacagcagcaaacagtacgcaagagaaacgatcaagcggttagcggaaacgattcaaagctgcctgcggacaattattacgcattgcgtgcagaaagaacaatcggaactgacgccaagcgatattttgttaaaaggcatgtccattgacgaattggatcagctcctcattcaactgccgcatgcaggtgagattgaaaacgtttatccgctcactccgatgcagaaaggaatgctcttccacagcttgctggatgaggactcgcattcttatttcgaacaagcatcgttcgatttacagggagagttaaagattgattggtttaaagcaagcctggaacgattatttgaaaaatacgccgtgctcagaacccgtttttacagcggctggaacgatactcctttacaaattgtctataaaacgcaaaaaccgcagattcattttgcagatttgcgcgacaaagaggagtaccaccgcgaggatgaaatcgcagcctatcaaagagaagacaaggaaaaaggatttgacttggctcggggtccgctgatgcgcatagcgattttccgtatggaagaccgcaaatatcatttgatttggagctttcatcatattgttatggacggctggtgcctgtctcttatcacgaaggaagtgtttgagcattatagagccttgcaagaaggcagggaaacagacctttcatctgcagctccttacagcgactatatcgaatggcttgacctacaagatcacagagaggccaaacggtactggagcgagtatcttgacggttataaaggtgaaaccaggcttcttcataaaagaacacagcatgaacaaaaagactatgcctatgccaatgtgatctgcgaattagaccgagaacagacaaaacggctgcagcagatctcaaatcagcatcaagttacattacattcactgatccaaacggtgtggggaattttattacagaaatacagcggttccccagacgttgtctttggcagcgtcgtgtccggaagaccggcggaaattcctggggtggaacagatgatcggcctgttcatcaataccattccggtccgcatccgctgtgatgaggacagctcttttaccgacacgatgcaaatggttcaacaaaaggcattggcttcccaagcatacgatacctatcctttatatgaaattcagacacaaacggatcaaaagcaaaacctgattgaccatatcatgatctttgaaaactatccgataggggagcaggtcgaagaggctggccatcatgatacagagctgaacatcacgaactttcatatgcaggaacactcccactatgatttgaatgtggttgtcattcctggcgaacagctggccgttcatttcggttttaacgaaaacgaatatgaaaaatctgatgtggagcggcttcgcggacattttgaacagctcatgcagcaagtattgcagcagccgtctgtcaaaatagaagatttggagcttctctctcagcaagaaaaagaacaactgctcagcgattttcaatctggcggcatgcaatactcccttgaacaaacgattcatgagatgttcgaggaacaggcgcaccgtacgccgaaccaagcggccgttgtatacgagggtaagcaactaacctacgaagaattaaacaggcgtgccaatcagcttgcgcgaaccttgcaggcgaaaggtgtgcgggcggatcagcttgtcggcattatgactgaacgctcgctggagatgattgtaggcatcttaggagtgttaaaagcgggcggcgcatatctgccgatagatcccgattctccgcctgaacgcatccgttatattttaagtgattcaggcatcagcgtattgctttatcgcggaaaactgcaggataacatcggctgcccgcggacatgtatcgatctcttggaggagcatgcctgccacgaagaaggaaacgaccttgcgctctctcatcagtcgactcaactggcctatgccatttatacttccggcacgactggaaagcctaaaggcacgttaattgaacatcgccaagtcattcacctgattgaagggctgagccgccaagtttactctgctcataagggggagctgaatgtagccatgctcgctccctattacttcgatgcttctgttcagcaaatatatgcttctttgctgttaggacataccttgtttattgttccgaaagaggtcgtgtcagacggtactgcattatgtcgttactatcgggagcattgcattgatattaccgacggaacacctgcccatttaaagctcttaatagctgcaggtgatttgcagggagtcccgcttcaacaccttttaatcggcggagaggctctttccaagatgacggtaaataaattcatgcgattattcggcgaccatggcgctgcgccaaggattaccaatgtatatgggcctacagaaacttgcgtagacgcgtccctgttccacattgaatgttctgcagatgcttggatacgcagtcaaattcatgtccctataggcaagccgttaggcagcaaccgcatgtacattcttgattcaaaaaaacggctgcaaccggcgggcgtccaaggcgagctgtatattgcaggggacggtgtcgggcggggttacttgaacctgccggaactaacgaatgaaaaatttgctgccgatccgtttgtcccgacagaccgaatgtacagaaccggtgatctggcccgccttctgccggatggaaatattgaatttatcggccggattgaccatcaggtgaaaattcacggttttcggattgaactcggtgaaatcgaatcggtgatgctgaccattcctgatattcaagaagccgccgtaatcgcccttgaagatgcagatgaagaatattacctgtgcggatactattctgcggacaagccaatacagatcaatgaacttcgcgaaaatatggcccggcatttaccgggatatatgataccggcttattttgtgcagctggatcaaatgccgcttacgccaaacgggaagctgaaccgtcagttattaccggctccggtcaacaagcgggacaggggcatagaatatgtgccgccgcggacttctgcagaaattcagctgacggcaatttggcaggatgttctcgggttagagcaggtggggattcgagataacttttttgatatcggcggacactccctgcgtgcaacggcgctgctagcaaaaatacaaaagcaaatgcatgtccaaattcctttgcgggacgtgttcctttttccaaccattgaacagctcgcgcggatgatcacagaaacggagtcaaccggatatgccgctattcctgcaattgaaaaaagaccttattatccggtatcctcagcacaaaaacggttgtacattctcaattctctggaaggaggagaactcagttataacatgctgggcctgatggctgtcgaaggaacgattgatcgtgaaaagctgcaacaagccttcctcacactgattcagcgtcatgaatctttgcgtaccggttttaaaatggccggcggagaacctgtccagtatgtcttggatcacgcagcgttcgaagcagagtggtatcaggcggaagaaaatgatgcggatctttatatccgccaatttatccgtccgtttcacctcgaggagccgccgctgcttcgcgtggggctgatcgaacttcaaccagatcgcggaattctgatgtttgatatgcatcacattatttctgacggaacatccatgaacgtattgatcaaagaatttatccggatttatgaaggagagacattaccgcctctgcgcatccagtacaaggactacgcagtatggcagaccggagaagcgagattaaaggagatgcaaaatcaagaagcctattggtcagagctgtacagcggcgacgttcctgtccttcatctgccgaccgattatatacggccgtcggcaaggggttttgcgggagccacgatgcattttacgctggataagcaaaaaagcgccgggttgaagcagctggcatcccaaaccgaatctactttatatatggtgctccttgcgtcttatacattattgctttcaaaatacagcggccaggaagacattattgtcggcagtcctatagcgggaagaccgcatgcggatttggaacccattatcggaatgtttgtcaatacactggcaatgagaaattacccagaaaaagggaagacgttcactcagtatctgtccgaagtgaaggagaatgcactaaaagcctatgagcatcaagattacccgtttgaagcactgatcgatcaactgaatatcgccagagatttaagccgtaatccgttgttcgacaccatgtttgtgcttcaaaacacggagcaggaacagttagagataaaagacgtatcttttaaaccatatccaaacgaacatacgatggcgaaatttgatttaaccttaacggctgtggaagaagagtcgggtattcattttacgatggaatacttgacgtctctgtttaaaccggaaacgatcgaacgtatgatggggcattttgtacagctgattgattcgattatcaaacagcctgaagccgaactggctaggttaaatatgatgactcgaaaagagaatagtgaaattcagaaactctttaacgataccgcagataaacgaattccgacaacggttcatcagctttttgagcagcaggctgagcttaacccagaccatgaagccgtcctgtttggaaatcaggcactgacttatcgccagctgaatgaacgttccaatcagctggcgcgcgtccttcaagataaaggtgcacgcactgatcaggtggtggccgttctcacggatcgctcagcaaatatgatgatcggcattttagccatattaaaggccggcgcagcatttcttcctatcgatccggaacttcctgatgaacggcgggcgtttatgctgaaagacagcggcgccggagtgcttttgactggtgcgggccacaccattccgccgctctttgaaggggaagtgcttttgcttgacgatccgttattatatcaaggcgaagcggacaatcttaatctttcctattcggagaatgatgtaatgtacatcatttacacgtcaggcacaacagggaaaccaaaaggagttcagctggagcacaagaccatgacgaatctgctcgcttatgaagaggaccatacgcagctgcgctttgacagggtgctgcaatttgctgcaatgagctttgatgtttgctatcaagaaatcttctccgcgctttcaagcggaggaacactctatatcatcagcaatgaggcaaaacgggacatacgccagctcaacgattttgtcaaaatgcacagaatccaaaccgcatttcttccgactgcgttcctgaagctccttgcctcggagaaacactatttcgaaccgtttgccgagtgcgtggatcacatcatcgctgcgggagaacagctcatcgtaacaaggatgctgcgagacatgctggtacgccaccatgttacattgcataatcattacggtccgtcggagacgcatgtcgtgaccatgtataccgttgacccggatacagatcaggaacttcagccgatcggcaaaccgatttcaaatacggagattttcattttgaatgaatcgggaacccttcagcctgtcggaatcgtcggtgaactttgtatctcaggagtcagcttagcccgcggttatcataacagagagcctttgacgctcgaagcatttgttccgcacccatatgacaagaagcaacggatgtataaaacaggcgatctggcccgttaccttcccgacggaaatattgaatatgcggggaggatggaccatcaagtcaaaatccgcggttaccggatcgaactcggcgaggtggaggccgctctgctaagtctcgagcctgtacaggaagcagttgttctggcaagagaaaatgcagatgggcaaagcgatttgtatgcctactttacaatggagcaatcactgccgatcagtcagctgaaagaaaaacttgctgatcaaataccgagctacatgatcccttcatacttcatccaactggagaaactgccgttaacctccaatggaaaagtcaatcgaagagcattaccgatgcctgaagccggtttgcaaaccggaatcgactacgttgctccgcggacgagtatggaagagcagctggtttgcatctggcaagacgttttgaaagtaaaagaaattggcgtaaaagataactttttcgatctgggcggccactcgttacgggggatgacgctcatcgccaaaattcataagcaattcagcaaaaacatttcattaagagaggtatttcaatgtccgaccattgaagaaatggcaaaggctatcgcagaagctgaagccgacaggccggattacattccggcagccgaggaaaaagatgtctatcctgtatcctccgtgcagaagatggtttacctgtcaacacaaattgaaggcggcgaacttagctacaacatgccgggaatccttacattagaaggaaaaatcgacatgaatcgcttgcaaaccgcttttcaaagactgattcagcgtcatgaatcactgcgtaccggatttgaaatgatccgcggggaactgatgcaggtgatcaagccggagataaatttctctatagaaagggacaaggcagcatcggacgaggttgaggaacttttccgcgccttcgtgcggccgttcgatctcagccgggctccgttacttcgggccggactcatcgaactagaacaagaccggcaaatttttatgtttgacatgcaccacatcattacggacggagcatccatgaatatttttgtcgaagaactgattcaattgtatgacggcaaagaattagctccgctccgtattcaatacaaagactttactgaatggaaacaccaaaaagaacaaagagaacgaatcaagaggcaggaagagtattggctcggtgtatttgaagaagagctgccgacattcgagctgccgaaggattttgcaagaccgccggtgagaagcttcgaagggaagcggcacaattttacgctcgataagactgtcatcgaaggtataaaacagctggaagaattgacaggtacaaccgcttatatgattttgttttcggcttactccatactgctggctaaatacagcggtgaggatgatatcgtcgtcggcacacctattgcgggaagaatgcatgaagatttacagcatatcatcggaatgtttgtcaatacattagccatccgtaccgctccaatagcggagaagacgtttttggattatataacggaaacgaaagaaacaatgctgaaggcttatgaacatcaagagtatccttttgaagaattagttgagaaattgggagtgaaacgtgatttaagccgcaatccgttattcgatacgatgttcgtactccaaaatacggaacaaacggatattgaggtggactctctcgctgtccgaccttatgaacaaacgagcacggctgccaagtttgatttacagctgaccttcgtaatggaacaagatgagatacaaggcagctttgattactgcacgaagctatttaaaaagaataccattgctgtattggccaaggattacatcatgatcctttcggcgattttacgaaacccatccattcctttaaaagagattcaattaagtgaaaaagtaaagaaaagtaaacatctcgcaagcacaatcgaattggatttttaatcatggccggcagcggctgtcccggcacgaatgccgcggctgccgccagccttcttcaaaacaggaatgaaaccaactggagggatatgaatgtcagaattcaaacaacaggagttgttctggggccgaatgtttcatgcggaagaccgccccagtgcattcccttcgtttcaagtgtccgactcaacagtaaagcgtgatgtaacgggtgcatctgattgtattcacagtacattgagtgcggatgtatcacggcgcatcctgaccatgacgcatcaaacgccaatggccgtctatctggttcttctgatcggtattgaatccctattgtataaatacacaggggaagaggacgtgattacaggagttccaacttttgaagacgaaactgatgaagatcttcgtgcagatcagctcatgttaattaaacagcatatcaatgccgacagtacgtttaaatcgatattccatgaactgaaacatacgctggatgaagagatcttatatcaggacgttccctttgataaaatggccggacagctgcagctgaactacaatgaaaatcatttgccgaacgtccatacagttgtttcgttagagcaaattcatcctgatcgtttcatagaaacggctgcttcagatgctttgtttcagtttgctatgggagaagactcgattgatgtaaagttattttttaatgaacaagtctatgaccgtcagtatatgatgcaggtgctcgggcatttaaaccgcctgttttccgtcatattatttcagcccgatctcaccctcggcgaagtggatattttgtcagaaacggagacaaatacatttctcgttgactatcatcatacgaaaactgaatatccgcgagataagacgatttatcagttattcgaagaacaggtgaaacggacaccggatcaagcagccattatttgcggagataggcaattcacgtatcgccagctcaatgaacgtgccaatcaattagcccgaacgttaagggccaagggcgtaatggcggaccggcttaccgccatcatcagcgaacacgagattgaactggttgtgggaatactggccgttttaaaagcgggcggagcctacgtgccgattgatccggattatccgaagcatcgcatacagtatatagtagatgactcccaagctgatatcgtcttaacgcagagccatctctcaaaacaattggaacttgcaggcacaatggttttcatcgatgaggaaagctcttaccacgaagacggatctgaccttgaaccgatcagcagtacaaaggatttggcctatgtcatttacacgtcaggttccacaggcaagccgaaaggtgcagcaattgagcatcagggtttaaccaattatatttggtgggcccgcggggtatatgtcaaaggagaaaaaaccaattttccgctatattcgtccatcgcttttgatctgacggtaacgtctgtttttactccgcttattaccggaaataccatcattgtctacggaggagaaaacaaggcggtcttgcttgattccattattcaggattcaagggtggatataatcaagctgaccccggctcatttgcaattattgaatgaaatgaacatctctcctgagtgcaccattcggaaattcattgttggcggcgataatttaagcacgcgtctcgcccgaaacatcaccgggaaattcggcggcagaatcgaaatctttaacgaatacggtcctacagagacggtcgtcggctgtatgatttattcctttgacccgcaaaacgacagacgggaatcagtgccgatcggaaccgccgcggacaacatgaacatttatgtgctggataagagcatgaaaccggtgccgatcggcgtcccgggggaaatgtatatcagcggggacggcatcgccagaggatatttgaaccggccggaattaacatctgaaaggtttatgcggaacccctttgtaccggaggcgaaaatgtaccggacgggagacttagcaagatggctgccggacggtaatatcgagtacctcggaaggatcgaccatcaggtaaaaatccgcgggtaccgcattgaaatcggggaagtcgaagcggcattttatcagataccgccgattcaagaagctctcgttatcgcacaagaaaccaatggggaaacgactttgtgcgcctattataccgcccagcattctttaaccgcgggtgagatccgtgaacatctgtcccggcagcttccggcctatatgatccctgcttatttcgtacagctgacagcgatgccgcttacttccaacggaaaaatagatcgtcaggcgctgcctgctccaacgggaaatctcactggcaatacctatacagctccgcggacggaactggaaaaaatactagccggggtgtgggaatcggtattaggcacagaacaggtcggtatcgacgatcatttctttgagctggggggagattcgattaagtcgattcaagtgacctcaagcctgtatcaagccggatataagcttgatatcaaacacttgttcaaacacccgacaatctccagacttgctccttttgcagagccggtcacccggatcgcagaacaaggggaaatgaaaggccaggctttactgacaccggttcagcattggtttttcgcccggcaataccctgatccgcaccattataatcaagccgtcatgctttattttaaagagggtttggttgaatcgaagcttcgggaagtcatgaagaagattgcagaacatcatgatgctttgcgcatggtctttgttccggcagatcatggataccaagcccgaaaccgggggatcggtgaaggagatttattcagcctcgaagttatctctttactcgaagaaaacaaccctgcccaaacgattgaaacgatatccgatgatattcagcaatccatccatttagccgaaggaccgctcatgaaattgggattgtttcaatgtcaggatggagatcatttgctgattgcgattcatcatctggtcgtcgacggcgtatcgtggagaattttacttgaagatataacgtcagcctatgggcagctccaaaacggcgaagcgatcaggcttcctaagaagacggattcctacctgctatgggctgaacgattgaaacgttatgcagaaagtgcagaatgtgaagcggaaaatcaatactggttcgggcagagccatatcccgcaatacaaattgccaaaggacaatgagcaggaggccggtctggccgaagaccgggaaaccatcgtcgtccaatggacagaggaagaaaccgaatgtttattaaaaagatcgaaccgggcctatacgactgacattaacgatttattgctgaccggactcggtacagctgttcatcgctggactggacatgaagagattcatgttcatctggaaggacacggcagggaatctatttttcaagaccttgatatttcacgtacggtgggctggtttacaagccaatacccggtttctcttcaaattcaggcagatcaagacgtctcacagcggattaggacggtgaaagaacagctgcgtcaaattccccaaaagggaataggatacggcctgattaaatatttgtccgatcatccgaaggcatctgaatggaccggacatccggaaatcagctttaattacctcggtcaatttgatcaagatctcgaaaatggagggatcgaggtatctccttactccggcgggaaaattgcgagtgacaggcatcccattacctatacgcttgacatcaacggcatgatttcagacagccggctgtcattggccatcagttactgcggtaaacaatatcgaagagaaacaatggaaatatgtgccgatctcttaaagagcagcctgaaagaagtcatcgaacattgtgcagttcaagaacaaattcagctgacgccgagcgatatttcgctgaaaggcatcacaatcgcgcaattagatcaatttgttcagcaaacacagcatatcggagagattgaaaatatatatcccttaacacccatgcaaaagggcatgctgttccacagcttaatcgattcggcttccagagcttactttgaacaagccgcttttgatctcaaaggcgacttggatatcgaggcatttacgatgagtttgtcacagctggcagaaagacatgagatactccggactcatttttacaccgaatggaaagatcagcctttgcagatcgtattccgaaaaaaacctatcgaaataaccgtagaagatattcgaagcatggagaatgaagaacgcggcgagttcattaccgactttgtacaaaaagataaggcaagaggattcgatcttacccaagatgcgttaatgcgcgtatcaatccttcttacagaggatgatcaagcccgattgatatggagcttccatcatattttaatggatggctggtgtctgccgcttattacgaaagaagtatttgaaacctattatgcgattcttgacagaagaagtcccgagcggaagaccgtcacccggtacagccgttatatcgaatggctggaagaccagaatcataagaatgcttcagcctattggcaaacatatttgaacggttatgaagggcaaaccgttttgccgaaagaatcagttccaaaccaagctgaaggatatcaaaaacaaatgctcgcattcccgctcggaaagcagctctcagaagaaatcaaacggaccgcaagtaagcacggcgtcactgtgaataccttcatgcaaagtgcgtggggattgttgctgcaaagatacaacaacagtcaggatgtggttttcggaacggtcgtatccggccgcccggcggaaattccgggtatcgaatccatggtcggcttatttatcaacaccattcccgtacgtattacttcacagtctgaaatgaccgtggaagaagtgttgaaattgagccaggagcaggcattggcctctcaggcatatgatacttttccgttgtacgaaattcaggctcaaaccgaacaaaaacagcagctgatcagtcacatcatggtgtttgaaaattacccggtcgagaagcaaatggagcatatgaaacaggaccatgacgcgctggacattatcaatttccatatggaagagcatacccattatgatttcaatttcattgtcatgccggcgggggaaattgacattcattttgtctacaatggcaatgtctatgatcatgcaagcgtcaagcggatggaagagcatttgatgcaaatcattaagcaaatggtcaacaatcaggcggcccgcgtccaagacctgaatatacttacggcggacgaacactcgctcctcatagaggcatttaatgatacggccgcagattatccaaaggaaaagacgcttcatcaattgtttgaggaacaagctgagcgaacgcctgagcaaacggctgtcgtatacggaaaaagccggctgacttaccgggaactgaatgaaagggcgaatcaacttgcccggacattgcaatcagaaggcgtgcagccagatcagccggtcggaatgatggtcgaacgttcactggaaatgatcatcggaatctttggaatcctaaaagccggcggtgcgtatgtaccgatcgacccgagttatccggacggccggattcagtatatcttggaggattcaggcacgaagctgctgttagtacagagtcatttgagggaaggcttaccttttagaggaaaagtgcttgatctggaagatccgcgattctccggggaagatgcttcaaacctggaacagacggcaggtccgaatcacttagcttatgtcatctatacatcgggatcaacaggccgaccgaaaggggttatggttgagcatcgatctgtcatcaatcgtctcgtttggatgcaggaacactacccgctggatgaacgggatgccattctgcaaaaaaccccaatcacttttgatgtatcggtatgggaattgttctggtggtcgatgacgggttcaaaagcggtattgctgccaaacggaggagaaaagaaccctgacgtcattttagatacgattgcgcagaaagatatcaccgttatgcattttgtacctgcgatgctgcacgcttttcttgaatccatggagcagaaatcctccggggaattaaaaagaaagcttgaaacattaagatatgtatttgcaagcggcgaggctttgacgcctgcgcacgtttccgggtttcaccgtttgatcacaccggcaggcaaggctcaaatcatcaatttatacggaccgaccgaagcgacgatcgatgtatcgtattttgaatgcgaagagggagacaagcatgcctcagttccgataggcagaccgatttccaacattcaattgtatatcgtacagcccgaatcagaacatcttcagccgcttggtgtggcaggagagctgtgtatcgccggagacgggctcgcgcggggatatttgaaccgtccggagctgacagcagagaagtttgcagatcacccgcttgaagcaggaaagcggatgtaccggacaggagacttagcaagatggctgcccgacggcaatattgagtatttggggagaattgaccatcaggtgaaaatccggggctacagaattgaactcggcgagattgaaacagctttattgcaactggaatctgtcaaagaagcgatcgtcatcgcgattgaagaagagcgctccaagcagctgtgcgcctacttgacaggggacgaagcattcaatacggcgcagctgaagcggcatttgctgaacaaactgcccgcgtatatgattccggcctattttgtacaagtagagaagatgccgataacggctaacggcaaaattgaccgaaaagctttgccggctcctgaagaaaatagagtgaccggaactgaatacgcagcaccgggaacgctgattgaaaagcagctggccgatatatggaaagatattttagcgcttcctgaaccggggattaaagatgacttctttgacgccggcggccattcactcaaagtattgcagctcattcatcaaattaacgccagtatgggaatcaacatgcattatcaagccgtatacgattttcctaccatcgaaacaatggcacgcgccattcaagcggcagtttttgaatccaagacggataacgtattcgtcaagctgaatcaggaaggttcaatccctgtgttctgtttcccgcctttaatcgggtacgggctggtttataatgaaatggcgaaaaggcttgatggcgaatgcaccgtctatgccgctgatttcttagaagagccggctcatgagaaggagatcgttgcccggtatgcagaaagcatgataaacattcaggaacaaggaccttttgttttgcttggatactctgcaggatcaaatttggcgtttgaggttgccaaagctttggagaatcggggacgcaccgtatctgatgtgctgatgctggattctaaaatcaccgattcggtaacgcatttatcggaaacggaaattgaagagatcgtccgtttgaatatagatatcattccggactattacagagaaatattaaccataccttcgattaaggataaaatcagaagctatctcacgtatcacaatgaactgatcaattccggcaacgttaatgccaatatccatcatttattatgcggcgatttgaccgatagaggctgggcgcaatccgctgcacagcattaccttgaatacaaattaaaaggaggccatgtgacgatctttgaacctcacaatatcgaagaaaatacggatgccattcgatctattatcaaaaggattgaagaacggcaccagcacgggcttgttcttgaagaacaactgttattgggatcgtttgcgggagacacaaagtttgacaaaatgtaaatgatccagtgcaaaatgccgctgactgcaatcggcggcattttttataaaagagggtcagatatttgcaacgttttcactctaaaaatcattcattttacgcattcttcatgacctattgttgtcatatttttcaaaaaccaaatatgtggaaacaggaggatgttaagctgatgaaaaagtgcagcgtatgtttattgattcttgctttattattgagctgtttacctggggaatatgcgaatgcggtaagcgctccaattgcaaaacatgcagggaattcaaacccgcttatcgaccatcatttgggagcagatccgtttgcgctgacctataacggaagagtctatatttatatgtcaagtgatgactatgaatataatagcaacggaacgattaaagataattcatttgccaatttaaataaagtattcgtcatttcttcagcggatatggtgaactggacagaccacggagccattccagtagcaggtgctaatggagctaatggcggccgtgggatagcaaaatgggcaggggcgtcatgggcaccatcaatcgcagttaaaaaaatcaatggcaaggataaattcttcctttatttcgcaaacagcggcggaggcatcggtgttctcaccgcagacagcccgaccgccccatggacagatccgatcggaaaagcgctggtaacgccaagtacaccaggaatgtccggtgttgtatggctttttgatccggcagtgttcgtagatgatgacggtactggttacctatatgccggcggaggcgttccaggcggttcaaatcccacacaggggcaatgggccaatcctaaaacagcaagagtcatgaaattagggcctgatatgaccagtgttgtcggaagtgcatctacgattgatgcgccttttatgtttgaagattcgggaatgcataagcacaacggaacatattactattcctattgcctcaatttcgggggcgcgcacccggccgataaacctccaggtgagatcggctacatgaccggctcaagtcccatgggtccctttacgtatagagggcactttctgaaaaatccgggagcatttttcggaggcggcggaaacaaccaccatgctgttttcaattttaaaaacgagtggtatgtggtgtatcatactcaaactgtcagctccgctctgttcggagccgggaaaggataccgttcgccccatattaataagctggtgcataatccagacggatccattcaagaggtagcggcaaattatacaggtgtaacacagctttctaatttgaatccatataaccgggtagaagctgaaacgtttgcctggaatggacggattttgaccgagaattcctctgcacccggcgggccggtaaataatcaacatataacaaacattcataacggagactggattgctgtagggaatgcagacttcgggtcaggcggtgccagggcgttcaaagcaaatgtagcatccgctgcaggcggaagaatagaagtgcggcttgacagtgtaaacggaaagcttgcaggaacactgaatgtcccttccacaggcggaacgcaaaattggagagaaatagaaactgcggtaagcggcgtaaccggtgtacacaacgtattctttgtatttaccggaacaggtacaggaaacttgtttaattttgattactggcagtttacgcaaagataacaccagttatggcaccgcttgttttcgaaataaaagcagacagaacacatttttctaatacggcaaaagataaaagatatatgaaggagaggaaaaaatgatgtcgggcgtaaaaaaaccaatttgtctattattggcatgtttcactatgctgtcagtactgttaatgggcccaggcgctgctgaggtcttagcggcaagtgatgtaacaattaatgtatctgcagaaaaacaagtaattcgcggtttcggaggaatgaaccaccctgcttgggttggagatttgacagctgctcaaagagaaactgcatttggcaatggacagaatcagttaggcttttcgatcttaagaattcacgtggatgaaaatagaaataattggtacaaagaggtagagactgcaaagagtgcgatcaaacatggagcaatcgtttttgcttccccttggaatccgccaaatgatatggttgagactttcaatcataatggtgacacttcagctaagcggctgagatacgataagtacgccgcatacgcgcagcatcttaacgattttgttaccttcatgaagaataatggtgtgaatctttatgcgatttctatgcaaaacgagcctgattacgcacacgaatggacatggtggacgccgcaagaaatacttcgattcatgagagaaaatgccagttccattaatgcccgcgtgattgcgccagaatcatttcaatacttgaaaaatatatcggaccccattttgaacgatccgcaggcgcttaggaatatggatattctcggaacccacctgtacggtacgcaggtcagtcagtttccttatcctcttttcaaacaaaaaggagcggggaaggacctttggatgacggaagtatactatccgaacagtgataacaactcggcggatcgatggcccgaggccttggatgtttcacagcatattcacaattcgatgacagaaggggattttcaagcttatgtttggtggtacatccgaagatcatacggtcctatgaaagaagatggcacgatcagcaaacgaggctacaatatggctcatttctcaaagtttgtgcgccccggctatgtaaggattgatgcaacgaaaaaccctaatccgaatgtttacgtgtcagcctataaaggtgacaacaaagtcgtgattgtggccattaacaaaaccaatacaggggtcaaccaaaactttgtattgcagaacggatctgcttcacaagtgtccagatgggtcacgagcagcagcagcaatcttcaacccggaacagacctcaatgtaaccgacaatcatttctgggctcatcttccagctcaaagcgtgacaacatttgttgtaaagcgttaaagacaacatcatagcaataagccaattttctcacacaaaaaagaaaattggcttattttctgtggtacaagagaagtattgattttttaactatgcacggacattgggtataataaagacaatgacttcaaggagtgatcaatgtatgtcgcagactcaaagcaaagtattaataatagatgacgaaagagaaattttggaactgatcaaaaccgtattaataagagaaggcattgatcgcgtgattacagcttctactgcccgtgatggattggctcaatttcatcaagaaaatccagatctggttatattggatatcatgctcccagacggtgaaggctatgatatctgtaagcaaataagagatatttcacatgttccgattatttttttgtctgcaaaaggagaggaaacggacaaaattgtaggacttgccatcggtggggacgactacattacaaaacccttcagccctaaggaagtcgcatatcgggtcaaagcacagctaagaagatcttcttacttacagccatctcaaaccgacaccctgataaaagcagggccctttgaattacatcagcagcaagccgagctcaccaaaaacggagcggctattgagttaacacctaaagaactcatgctcatgacatattttttgcagcatcccaatcgggtgatcagtaaagaaacactttatcaagctgtatggggagaagatttcttcggttctgacaatacggtgatggttcatatacgcagactccgggagaaaatagaaaccatcccatccacaccagactttctcgtcactgtaaaagggttaggctacaaatttgttgtaaaggatgcttaagtatgaattggcgattaacaggcaggtacatggtatctgtcatcatagtaaccatcattactgttttcattaatttatttgttttcatgatttggctcatttttcaagcgaacagtcaacatgaggaagaaaatacgccagaatccttcacaagatcatttcagcaatatgtcacattttccaataatggaatttcagtaaacaaagagggccaacaagccttaaaagaacagaatgcttggattcagatattggatgaaaacggacaagatgtgtatcatgctagagcacctaaaggcctgaaggaaaaatatacgcctttagaaatagtgaatttacataaatataaggataagaaattattatcaaccatttacgccagcggaaaaaaagtgaacggcaaggagtacagttactttatagggtttaaaaatccctctctcgcaaagtatatcctctcatatgacaccaaggaattagtgacgaagttcaatgcagggaccatcattttattatcaatagatgcaatgatcgcgttattgatcggatatctattcagccggcagctcacaaaaccgctaggcagtgtcattcaaggaatccaaagattagctaatggagattacacgatcaaattgacatccaaaggaatttataaagatgtgttctataatgtcaatcacttagcggaacaactatcgtcaagcaaaaaagaaaaagataaattagagcaaatgcgtgaagaatggatcagtcatatttctcatgacattaaaacaccattagcctctatacaaggctatgcagaaatcatcaaagatccaaattaccatctttcagtcgatcagatcagagattacgcccaaatcattgagaataaatccctctatatgaaagaagttgtggaagatttaaatttaacgacaaggctgaaaaacaacgatgtgatgttaaataaagagcaggtaaaccttgttttgctgctgcgggaaacattaattgatattttaaacgattccagatatgcggataagactattgagcttcaaaccagcctggaaaagctgattctgaaccttgatgtaatattgatcagaagagcggtcacgaatctcattttaaatgctctcgttcacaatgatcctgatgtgaagatcgttgtacagcttgaacaaaaagaacgaacccatgtgacaattaaggacaacggcaaagggatagaagaggaggagctggagaaagtgtttgaccgctattacagagggacaaatacaggaacagcgcatgcaggctctggtctagggatggccatagcaaaggatattatccaaaagcacggcggggacatcaccattcacagcaccgcggggaaagggacaacgatagatatccaattatcctaatggccacacaaaaaaaacggttctgctcatcaataacagaaccgtttttttacttattgttccgaaaacactttgattcctttgacaatgttccagatgaaaaaatagatcgccaaaataaatgtaacggcatatgtcgcaagcaggaaaggcccagcatgactgatgtctttcataccaagtaaacctgaaccgatgatgccaattccgaaaattaaataaggtatcaaatgcgtccacaaagattttttcgcatgatatttcacatcgtcctgacctaagaaatagacgataatcggaaacaaaaacggcgcaaaaaatatactgaagtaacataatgaagacaaaattttattttctctcaaaacttttcacctctatcatttattgaaggggaattcctttgactgaatcccttactgaagtacaaacctattgtacaatctcaaccttaacctgtattaatccgaaccttacatcaaccttaaattaacaagcaccgcttaaataatcagaggaaggagacccaggcttaaaagaacccaatatgaatttcattttctagtttacataatatatattctaggaagttgcacaaaagaataaaatctgtgtctcaacacttaagtatactttagttattgagacagaaaagaaatttataacaaaataagcggtctgttgcgtttgcggtcattttgttaacctgttgtagatacagctgaatcaaacctgacactgcaaacggtacaaaagcaattttcaaattatcaaaagcaaaccattgctgttttctgcattttattatccaatgaaaacgcgcacaaatgaaaaattcatgtctgataatactctgccgcaccttccctgctcgtttccgccgattttctcgcatcggcttcccacatagtccataaagcgcctgatacgcccccatcgttgttgctctcatgtcttgcggaacagtttcaatcgacattccaagcagcaatggaaaaataaagccaattgaaagcctatgcaaacttgaacgaaataaagcgccattgggctgcttgagtacatcacaataacaaaagcgctttcagtcaatatgaatattcccgcacccatatgatgagaaaaagccgcctgatgaacagacggctttgcagcttgttatttgcttcagggagcgtgagtgatccgataatgcacagttaaaaacttcaggccgaacagccacatatgatgaacggcctttagtgttgtttcgttttgggccgcaataagaaatgtctctgccagcggaagatgacatgcccaccatttcgtttgaagataaattccttcatcacccgctccgctttttcggcgtctgctcgtcaaaacaagattctgcttatgcgcataaggctttaaaatgcccgtcatttggctgtacggcagcgggagagaaatatttatgtatccctccccatttgacctgtacactgaatacagtgcagtaaagacggtttcctgcctttcattagttctgatccacgcacggacatgctttcgtccgtctctgtcagagtcaacacctttcatatcgctgtgcatgatataccaatccggattcattgacagatggatctgccccgctcttctgctgaacggctcgtacatgcgcgcaaacggacgaaaccatctgctccacgtcactttcgccttgatgtcataatcaattgtcttttcataaaaggaaataacggccggcgacagtttttcggcagaaaagtcttcagaatgcagctctctcatctgatctagaaggccggtataatgtatgtcatttgctgcatgaatatcattcaaaaaatttttgcctatcgtcctctttccgtaaatacggctgaacgttcgttcactgccttcatcgaacggtcttgggttttctattctccagccggccaaagccggcagaataacgccgaatgcattgacggccccgtgaatccaaatcatctggctgatcgtaaacgttgcctccccgcggaagacaccgaacgaatatattaaagaaaaagcaattgttatcattaacacagctgaagagcccctgattaagatactgcctgttttcgtaacaaacggcgccttaaagacgagatacgcattaacatacagacccgccagatacagagcgacggcaatcacatcaagtgtctttgaaaatgtaatccccatggcaataagaatcggcgaaatcaaaatgatgaccgtgctccacctgtaaaggacgcggttctcccggatgatccttccgagcaaaccattgaagatcggaataagaaatgcggaatagtgaaagtgcacagccgtcagcagcacgataagcggactgaaatccatgacgggaatctgaagaacgtatgcgaaaaaccagactccgccgccggctaaataaacaaagcctgccataactgacatctcttctgttctatgaatatttgttttcaccagccgcagtacagcatacagcgccaaaccaagcgtataaatgaaccacacaacggcaaaaaagctgaagtctgtgatcagcgcaagcgccgcacttaaagcggcaataggataactccgtaataacacgttctctaaagtttttgaagaccgaaaagcaaaagggaatacagcaggaacgaaaagaaggacggataataaaacaaacgtctcagcagctgatagatgcggagcttcagccgccgcaaatcccaaaaagcaaaccgcacttacaataagatgacgtttcagcatatttctccctctgtttcccgaaaagtcccccggtaaaagaaaagtgtgccgagtatccggtttttcacatgtacctttatgctgaagcaattcatctcctcatcataagcctcataaacggttgaactgccgcacagccatgccggcagcaggattttctttccgcctatcaggagccactgctttccggatgtaatgacaagccctccggctgaagacgcttctaaatgcagttcagacagaaggatgtgaggcttgccgaagtaatcaagaattctattttcccgctcgtcatattccatgactgcatcaaaataacgcgtttttcctttaaagaaaaaggtacggttccattccacgccatttagcctgtttttgttttcgatggtaaaagggatatctttgcccctctctgagaaaaaacatctgaaaaaaacgccggtctttaaaagcattctgacaaacaaagatcctcccttaatttctgacataactccttctccgcaaaatgtgcttgatccgccaagcctgtaccttttctgcagcattggatgcagtgattgataatgaataattgctttttcatacattgaatccgtcatttcgcttctctctctttcgttttgtatgtccggcgctcggcagcttaagctcaagaatcaaaccagctatcgtaagtattcctaacgggatcgcgaatccgccgccggaatatagcattgccgatatacaaaagaagactgactgcccggcgtgaatcagccgctttctccgcatgggaagcagccataatacccctaaccctgtctccagcgcgcccctcactatctctgcatcggcaaagcaatcataaaagccttgaaaaaaccaatacagactgaatatcagacacatcaagacatagacaaatccaaaacggatggatatcttaggatgtctgttttgttctatccaaagccgtaacgcatcaaagctccatgcggtagcccagcccagcagaggacgaaataaaaaccggtctatcaatcttcccggcagaccgcgggccgtttcatattaatattgagtcaaaaatgtatgtttccgttatcccgctctatatacttccaatagcctctgccctcttttatcagagacagcgggtgatcagaggcaaatgcaagcgctgagaccctttctgacgattgaggccttttgtcacccattgatttgcctgtgccggataccttcagcccaaaaccgatccgtgtttcatataggaatctttatctttgcggttcacctggcaacctatgaagatatgtaatgtcagaaaagcgcaggtcccattccttatgaagaagcgggttttgcgtatattcccaaagcgtttctatatcagatgcaatattgatttcgacatatatcggcttctgtttcatgccccctcctcttcccttcttttgtaaacaattcctatattatcataggaacagataaagcggcagaacaaaaaggccatcccgtttccagcaggagagcctctgtgactttgttgacttatatataagtgattttgtctttttatcttcagttaaacatagcaaatccgacagagaaattggtgaaaatcagccccattttgggttgccaatgtgagatccttctttacacgaaaacccttacagatacaagatgaaaatacaataaattcaaaaaagtctgtttacaagaacagtttttcacataaaaaactcctcacatttttctgtgaggggttttgaaaaatatatgcaaatttccttagttagcagtcttgcgttcagggcttgtaccttcttcttccgcccatgtttcaatatgcttcagctctggggcattctcagctttgaacacgggatcaagaccttttttgcgctgagcggcataatccttatagatcttgtaggctacattactcagcagcaagattgccactaagttaatgagagccaagagtcccataaacaagtttgccatatcccagacaatctggaagtcagccaaacatccgtataccaccatcacgatgacgaatacgcggtaaatgttaagccatgttttgcttgttttaataaattcaatgttcgtttcaccatagtaatagttgccgacgactgagctgaatgcgaataaaaacatcgcaatcgcaataaatgtcggcgcccagccgccaagatggtgctgcagtgcggcttgtgtcacttggatgccgtcgcctttaggcgtaacgctgtacaataaaatgataaaagcagtcgatgtacaaacgataaaagtatcaaaaaacacgccgagcgtctggatgaatccctgtttagccgggtgcgacacgtgtgcagttgctgcggcattcggcgcgctccccatacccgcttcgtttgaaaacaggccgcgctgcgctccgataataatgatactccctaagcttccgccgacgatctgctcaagaccgaacgcatttttcacaatcgtaaccagcagctcaggtaccgccgtaatattcacaataacgacatacagcgcgatcagaatatacatacccgccatgacgggaacgattaattgtgaaacggatacaacacgtttcagaccgccgaatatgatgaaagccgttaatacagctaaaatgattgcgataactgttttattcacatggaatgcttcgtcaaacgcgacggaaatcgtatttgactgtacggcattaaatataagcccgaaagaaacggtaatcaatacggcgaataaaataccgagccagcgggcgccgaggccctttgccatgtaatatgccggtccgccgcggaaatcttcgcctgaacgcactttataaagctgcgccaacgtactttccacaaagctggaagccataccgacaatcgctacgatccacatccaaaatactgcgccgggaccgcctgttgcaatcgccagcgcgacaccggtcaagtttccggttccgacacgggaagcggccgagataaagaatgcctgcattgaagacactcctttatttccttgcggcttctccccgacgattctgaacatttcaataaagtatcggaattgaataaagcgaaaacggaacgtaaaaaacaatccgattcctactaaaatataaacaagatacttccaaataaaatcatttggaacatttatgatttcactgatgaaagcctccatgtttaacctcccttttacatatcttttactgtcattttgctgcatatgttagattttttaacacaacgagtattattatatcacacaaacaggtgttgagaagtttttttaagaaaatgttttggtttctccattacgctttccttattggtatgctctttttttatccctcagactgaaaaatgttgtcacgtcagaaggcttgcgtgcatatgataacaaatagcctttaagaaaaaagagatgaaaagacggacggaatggtatatacttaaccaggataataattttttaaatttaataaatgtgtttacttttaatttaaattagggtattataataaaaatattcagacttatgaaggggggagaacatttgaaaaaaatcttgtttctaaaagcatctattttatttttagcgattgcaagctttcatttgctctccattccccatgcgtttgacactgctcatcattttaaagcggtagccgatcagcaggaaatgcacgaaatgaaggccggccaaaacgttgatgatgacaaaaaatcgctgacgggctcatttattttgacggcgctttttgccgcttctgtctcactgatggtgatatcagacagaaaacgccccgcttcccggagaagacagcgaaagaaaagctttttaatcgctaaattttatcagtcctcgtatttcgataagcttcatgttcaacatcgcctgtctatgtaacataaaatgaggaggtcgttaaacatgttgtttatcttacgaatggtgattttaggcttattttcattcactgcattgaacttatttgtatggcagggaattgaagtcgttcacgctatcactgacttattcggcagccacgaaagctaaaaagcaaaacctccgctcaggaccaattgagcggaggtttttttattttatttttactcttaaacatcagacgcgggtatgcgccatacatctgttaccggccctgtctcatcttcatctgtaaagaaggagccgttgctgtaccggtcattagcccgcaaggatttcacggtggtttcaattctctcgcctttttctgtttctgcagcaatcgtgtcggctaaagcgcaagcgaatactccgacaacacgatgcgggttctttttaagctcacgcagcatgatgacgccgcgctttgctctggatgttttttcgaattcagagagattcatccgtttgatggctccccgctgtgtgacgaggacaagcgaatctgtttcatgcaggatttgtcctgatacgacggtatcaccgtcttttaaattaatgcccttcacgccggccgcacgggctccgactacattcacttcatcttcaccgaaccataagccgtacccgaggtgggtggcgataaacagctgacagccgccgtctgtgacatgaacatcaaccagctcatcgtcccctttaaggttaagagcaacaagcgctttcgagtagcgctgcgctttgtaatgcgtcatttcagttcttttcaccataccgtttttcgtcataaacaataaatatgaagctggattaaattcttttaccggtatagctttcacgatcgtttcatcacggtcaatcgtggtgatgttcgttacgtgctgccccatgtctttccacctgatatccggaagctggtgaaccggacaatatatatagcttcccttattggtaaagagcaggagaacatccgttgtattcatttcaaattggtgaatcagcctgtccgtgtccttcatcccgaaatcctggccgttggaagcggcaaatgaccgctggcttgttcgttttacatagccgtctttcgtgactgtcacatatacgtcctcagaggcaaccatgacttccagattgattttaatttcctcaatcttctcttcaatgaccgaacgtctgctgtcagcataggtctttttcaattttttcaggctgctggtaatgacttttaacagctttttatcatgacttaaaatggcttcgagctcctgaattttcttgctgagctcttccgcttcctcttttaacgccgtaatatccgtgtttgtcagacgatacagctgcaaggatacgatcgcttccgcctgaggctccgtgaatgagaatttagaaattaaattttgttttgcatcctttttatcgctgcttgcccggataacggcaatgacctcatctaacacagacagtgccttcatcagtccctcaacgatatgatgccgctcttttgctttttgcaattcaaagacggagcggtttgtcacaacttccttctggtgggaaatatacgcatccagaatggccgtaagactcatcagcatcggccggcggttatgtatggcgaccatattaaagttatacgttgtctgcagatccgtgtttttatataagaaattcaagatgccctttgcgtcggcttctttctttaattcaacgaccacccgaagtcccgtgcggtccgtttcatcccggacttcagaaatgccttcgacttttttatcaatgcggtattcgtccattttctttacaagattggctttgtttacttcaaacgggatttctgtaatgacgatctgctcccgtccgcctcttacagcttccacttcagcctttccgcggatgataattttgcctttaccggtttcataggccttccgaataccgtcgacaccttgaataatgcctcctgtcggaaagtcaggccctttaatcacctgcatcaagtcatcgacggtgcaatcgggcgattcaatccgcttaatgacggcatcaatgacctcacccagatgatgaggaggaatatcagtcgcatagcccgccgaaatcccggttgatccgttgaccaacaagttaggaaacatggcaggcaaaacaaccggctctttacttgtgtcatcaaagttcggaacgaattcaaccgtgtttttatcaatgtcccgcaaaagctctgatgcgatagaagataatctcgcttccgtataacgcatggcagccggcggatcaccgtcaatgctgccgttattgccgtgcatttcaatcagcacattccgcactttccaatcttggctcatccgcaccatcgcttcataaacggagctgtctccgtgcggatgataattaccgataacgtttccgaccgttttcgccgctttccggaaatttttatcgaatgtatttccgtctgcgtgcatggcgtataaaattcttcgctgcaccggctttaaaccgtcacgtgcatcaggcagcgccctgtcttggataatgtatttactgtagcgtccgaaacggtcgccgattacttcttctaacggtaaatcatgaaataattctggctgtgccactattaaacctcctcagcgaccgacaagttttcattttctaaaatattgctttcctcgtctaatccgaaggcaacattcttttcaatccattttcttctcggttctactttgtctcccattaatgtcgttacgcggcgctctacgcgtgccgcatcgtcaatcttgactctgacgagcgttcgcgattcaggattcatcgtcgtttcccagagctggtctgcgttcatttctcccagacctttatagcgctgaatggtgtagcctttgccgactttctttaaaacgccgtccatttcttcatcggaccaagcatattcaataatctctttcttgccgctccctttgctcactttataaagaggcggaagcgcgatgaagacttttccttgctcaattaaaggtttcatatagcggtagaaaaacgttagcagcaagacttgaatgtgcgcgccgtcggtatccgcgtccgtcatgatgatgatcttgtcataattaatgtcctctatctcaaaatctgcgccgactccgccgccgatcgcatgaataatcgtattgatttcttcatttttgaagatgtcagcaagctttgctttctctgtgttgatgacctttccgcgaagaggcaggacggcttggaatttccggtctcttccctgctttgcagaacctcctgcagagtctccctccacgagatacaattcattcttcgccggatttctggaaccggcaggtgtgagttttccgctcagcgtcgcttctgattttttgcgttttttgccgcttctcgcttcttctctcgctttacgggccgcttcacgggcctggcttgctttaattgcttttttgacgagcagggtcgccgtatcgcggttttcttccaagaaataagcaagattctcagaaatgacagcgtctgcggctgatctcgcttcacttgtgccaagctttccttttgtctggccttcaaattgcagcagttcctccgggatccgcacggaaatgatcgcggacaaaccttccctgatatcggcgccttcgaggtttttgtctttctctttcagaagcgcgacctttcgcgcatactcattaaacgctcttgtcattgccgttttggctcctgattcgtgggttccgccgtcctttgttctgacgttattaacgaatgacagcatattttctgagtatccgtcattaaattggaacgcaaaatcgacttcaatgtcatgatgctcgccttcaaaggaaaccacttcgcataaagcgtctttttcttcatttaaataagcgacaaatgcttcaattccgttctcataataaaatacttctttcacatcgttccgctcatcaattaattctattttcaagccttttaataaaaatgcggattcgcgcagacgttctgacagcgtgtcaaaattataaaccgttgcgctgaacattgacggatcaggtttaaaatgggtaagcgttcccgtttttttggtcgttccgatcttttcaagtgaagtcacaggcttgccgccgttttcaaaccgctgtttataaacatggccgtcacgctcaatggtaactgtcagccactctgataaagcgtttacgacagatgcgccgacgccgtgcagacctccgcttgttttatagccgccctgtccgaatttacctcccgcatgcagcacggtgaaaataacttccggtgtcggctttccgagcttatgcatcccggtcggcattccgcgccccctgtcctgcacggagatactgttgtccttatgtatcgttacgataatatgatctccgtagccggcaagaacttcatcgacggaattgtcgacgatctcatataccagatggtgcaggccgcgtgcgtccgtcgaaccgatgtacattcccggtcgttttctgacggcttccaggccttcaagcacctgtatggcatcttcgttgtaatcaaattgctgttttctagccaaacgtacaaacccctttcaaaaaacctgctcttaatcattctcttttttaagtgttttcatgtctttgtttttcagtatgcgcaagcttcggtccaattctcctcggactcacaattataaccaatatgcttgatttcgcaacatatttaagcgaatggctcgttttttaggccgcaagacatacattcgaacgacttttcatctttttggtgcccttttcggcaaataagaacatgagttcgctttctattatatagatttttgccggccatcgcaaacagactgtaaacccctgtataaaggggtttctaaaaaaactgttcatgctttattgtatctgtttcaacaccatacgcaaagagtattctttcaataaaaaagcaaaaacccctgatttgccaaggatttttgcctttttttgttcctattttataacagcgcgggcgacttttatacataaatccataacagccgtccttcctttgtctgtaatcatgcgatacgcttcttcatttgcaaggccctgctgcgcccaaaaaacgggagcgtctgtctgtaaaaattcttcagcgacacccggaagctgctcagagcgtctgaacacattcacgatatcaatcggtccctccacgtcttttaacgaagcgaccgctttcacgccaagcgcctcatcaatcgtcggattgacggggataatctcgtacccttcatcctgcatcgctttggagaccatataagaagtccggtcgggacggtctgacagcccgacgactgcgatccgtttgcttcggtcaagaatgtctttaatctctgattttgaaggattttgcatctttaccatctccttttgatttattgtacacgacagcttcatcggaatcaaaaaaagcggtttgtcagcttaattctcaaaaaaacttgtcatcagatggtaacaactcgtgttaaaatagagtgaagggacattgaaaaggagaaatgtagatgttgattgctttattgattattttggcctatgtattgggcagcatcccgtcaggtttagtggtaggcaaacttgcaaaagggattgatattagagaacacggaagcggaaatttaggcgcgacaaatgcttttcgcacgcttggcgttaaagcgggatctgtcgtcgttgcagccgatattttaaaaggcaccttagccgcggcgctgccgtacttactgcacgttcccattcatcctcttctcgcaggggtggcagcagtgatcggccatgtattccccgtgttcgcgaaattcaagggcggaaaagccgtagccacatcgggaggcgtcctgctgttttatgctccgctgttatttgtaacgatggttgcagtgtttttcgtatttttattccttacgaaatttgtttctctgtcttcaatgttaacagggatttatacgattatttactgtctgtttgtaaaagatccttatttattaatcgtagtgacgctcctgacggcgtttgttatctacagacacagggcaaacatcaaacggattataaacaaaacagaaccgaagatcaaatggttttgatgaaacttcatttttgacatcaaaatgccgtatgcgtttataatagagataatttctttatgagaaacaaaaagggagtgttccggatgaacatgaaagtaaacaaagacgcgctggattggtataaagaagagcttgaactggaaacaggcgatcaggtccgtttctttgtccgttacggagggtgcagcaatgtccagaaaggcttttctctcggtgtatcaaaagaccagccggtgaacgccggcatcagtacggaagttgaaggcattaccttttttattgaagaaagcgacttatggtactttgataaccacgatttgtccgtcacatattcagatcagtcagaagagccggtatttaattacgtgtaagaaaaaagaacgcagcggatgcgttctttttttacagctcaaaccttctgatatgatcagtcagacgttctttttctaatatgcgtttttgggtttcaccgagcagatcaaagtgcggaaactcagttttatggtgaatccactcgggcttcagcccgtattcagctccccatctgatcagcttattgagatcgcttgaaccggccttcgtcacggtcttagcctgcggaaagcggtcgtccagccagtaatgcgttaaaaaagcgatttttccttccgatacatcccgcttccatctttccagttctttgcgcgtaattccaaatgccataactgcagccgctccttatttttttgccttttcgtaagcggcgtgccaatcaggaaaggccttgcggaactgaatcggtttgaagctctgtttatcaacgcatatgtgcgaggatgtcgcttcgatcgcaagctcttgatccggattatagatatggtagccgtaaacggttttaaatccgttatattcttcaatccacgtatgtacgacagccgtttctccgtagcggagcggttttttataagaaatgctgatatccactacaggtgacagcacccctctttcttccatatccttgtacagaaatccgaggtctttaatcaatgccgttctgccgacctccatccagactaagtaattggcatgatagacgatgcccatttgatctgtttccgcataccgcacttctatttctttttttgacacatgcaacgttctctgctcccttattatcagatagccctattttatcacaacaagacagaaagagaaaaaaccaggtttccctggtttttattacgattgatatccgttttctctcgcagctgattcatcctgaatttcattacggaacgattcaatgctttcattgcgtctggcattcttctcctgaatgcgctgtttttcctcatctgtcgcaaattccattgattctttcgcttcttctatattttcaattgtattctgaaccatatcctgcaacttttcaacgttatcggaacggtcatccggattcggttttttgtaattgtttttcataatgtctgctctcctttgttgatgttattcgcctttcgtctgcatgacaatcggatgtccgtttgacttgtcatgaaacatttcccctttgttgcgtttatatttaacgggttttgtccctaagtggctcggagcgtattgcggctggccgtctttcttgtttgtgcccatgttcatccctccttaagagtatatttcgcaaaaggaggcgcaaacatgactgcaaattaaaggttatttttgtttgaaccgctgctccagcttttcttcaagctgattcaaatattcggtattggtcatcaactcacgtttattctccataaccaactcatgaaaagagcgttttctcatttttttcaatcttctcacctccgtgttttcattcattttttccaattttttaaaagattagcctttcgcacataaaaaaactgaacctctacttgagatccagtttttctttcatttcttttttcgtcatcgtgcctactcgtatgtgctgaatggttcctttttcgtctaatatgtatgatgtcggataagaaagcacgttgaaatctccgttaattccgcttttatcaatcagaattggaaaagtcagctgataagtctcagcaaatgatttcacagcctgtatatttttttcagaggatgtgaaattaacggctactaccgcaatatcaggatattccttctgaagctcctgcatatcgggcatttccattcggcatggcttgcaccacgtcgcccagaaattaagaagcactttttttcctttataatcagaaagggagctgctttttcctgccagtgtgtcaagtgtaaagtcaggagccttcatcccttcttctgtcccttctttcggacttgtttgtacggaataaatattccagcccgcatataccaacaacccgataagcaacactccgcccagccatttcgcaagcatctcaaagcctcccgcataaaaagagagaaagcggattgctttctctcttttgttcattctgctactgtttcattttatcgcgaagcaccatttgtaaaatgccgccgtggcgatagtaatcaatttccacttcactgtcaaaacggacaacaacttcaaatgtttttaccgtaccgtcttcactgattgctctgacagtcagcaagtcgcgcggacgtacagtttcatcaacatccacctcaatgacttccttaccggttaagcccagtgtatctgcgttttcaccctgtttgaactggagcggcagcacacccatgaagacgaggttgcttctgtgaattctttcaaagctttctgcgatgactgttctgatgccaagcaggtttgttccttttgcagcccagtcacgtgaagagcccattccgtaatctttgccggccaggacgacaagacccgttttatcatctttataccgcatgcaggcatcataaatagatgtcacgtcaccgctaggccagtgtgttgtatatccgccttctgtgcccggcgcgatctggtttttaatacggatattggcgaatgttcctctcatcatgacttcgtggtttccgcggcgtgagccgtaagagttaaagtcccgaggagaaacgcctttttcctgcaggtatttgcccgccggtgtgtcttttccgattgctccggccggagaaatgtggtcagtcgtcacggaatcgccgaatttgccgacaacgcgaagccctcttaaaggctcaacttttccgggctctacagacatttcttcaaagaacggcggattttggatataagtggaatcctgatcccatttatatagtgcttcatccgtcgtttcgatttcattccagcgctggttgtcatcaaataccgtttcatactctttacggaataattcaggcgtaacagtctgtttaacgagagaattgatttcatccattgacggccagatgtcatcgaaataaacgttttgtccgtcttttccaacgccgatcggatcagattttaagttgatattcacagtgcctgccaatgcgtacgcgacaacaagcggcggtgaagcaaggtagtttcctttgacaagcggatggatccggccttcaaagtttctgtttcctgacaggacggaagtgatcagcagatcatttttagcgaccgcttcttcaatctcaggagaaagcgggccggagttcccgatacatgtcgtacagccgtaaccgacaaggttaaaaccgagctccttcatgtaaggaagcaggcctgaattgactaagtatccggtaacaaccttagatcccggcgcaagtgatgttttaacgtaattcggcactttcagtcctaattcaaccgcttttttggctaccaatccagcaccgattaatacataaggatttgatgtattcgtacagcttgtaatggcggcaatcgcgatagcccctgttttcataactgcatcttcgccgctgttaagtttaaatgagatttctttgttctcttcagccgcatccattccgaatccttggttgcctgccgggctgacgagatgttttttaaacgtttcctgcatgacagagagcgggattaaatcttgcggacgtttcgggcctgaaaggttcgcttcgatttttgacagatcaatttctacaacgtctgtaaaaatcggctcttctgcgtcaggcgtatagaataaaccgttgttgcggcagtatgcttctacgacatcgatctgttcttcttcacggccggtcagacgcaggtaagaaagtgcttcctcatcaacagggaagaatccgcaagtcgctccgtattccggcgccatattggcaatagtcgcccgatccgcaagcggaagctcagcaacccctgggccgaagaattcaacgaatttattgactacacctttttcgcgcagcacttgagtgactttcagcgccaagtcagttgccgttgttccgttaggcaattttccgacaagtttcgcgccgatgacctcaggaacagggaaatatgaaggctggccgagcattcccgcttccgcctcaataccgccgacaccccatccgagaacgccgattccgttaatcattgttgtatgggaatctgtccccaccaaagtatcaggatatgtcacaagctctccgttttcttctttcgtatggacgacacttgccaaaaactcaaggtttacctggtgaacgattcctgttgcaggcggaacagcctgataattgttaaacgctttctttgcccagcttaaaaatttataacgttctgcatttctttcgaattctaagtccatattaatggctaacgcgtcttccgtaccggctttgtctacttgtacggagtggtcaatgacaaggtcaaccggaatttccggattgattttatccggatctccgccgacagaggccattgcttttcttaaagatgccaggtcaactactgccggaacgccagtaaagtcctgaaggataacacgtgacggtttaaacggcacatcaatatcttttaattcagcagtaccccatcttgccaaattttcaacatgttcttttgtaatgacgcgtccgtctacctgacgcaaaacggattccaaaagaaccttaatagaataaggaagttttgaaacattgccgacgcctgcgtcttccaatgcttttaatgaatagtagttgtatgttttcccatttgaagaaaatgtttttcttgcttggaaaacgtcttgtgttgcgactttttgctggtttgtcattccccaaaatcccccttcaaagatcaagatcgttctttagatgaatgttcacattgcatcacaattttctcacaatttcatcttagtataaaatcatacataagtaaatatcaatgtttttattaaatacaataagatcgtcttatcagtatgattttcggtaaattttgtcctgatttacgcctcatataacgggctgcaaagagccatattaatgttgaggtgatgatcatggtaaaacggaaagccaatcatgtaataaacggcatgaatgacgcgaaaagccaaggcaaaggcgcgggttatatagaaaatgaccagcttgtcctgacggaagaagaacggcagaacaataaaaaaagaaaaacaaaccaatagccgtcacaccttaaaaaggaggctttaacatgacaaataaaaacacgagcaaagatatgcataaaaatgctccgaagggccataatcccggccagccggaaccgctaagcggaagcaaaaaagtgaaaaaccgcaaccatacaagacaaaaacataatacaagccacgatatgtaaaacagaccttggtgtctgtttttttatgtcattcacccattcaaagtgtctgcatacgttatagcaaggcttttaatatggagggatgcttccatgaatcattcaaaaaacgctgaagaatttgatgataccgaggaatggctgcggcagttttacgaggatccgtatgcttggtatgacgagacgctgccgattgatctatatgaaacaagccgtcaatatatcattgaagctgacctgacggcgctaaagccggtgcaatcgatgaccgtcactctttcgggacttgaattcatgctctctgttaaaacgcttgaacggacgttaaacaaacaaatgatgcttcctttttatctgaatgacaaacatattctcactgatttcacaaaccatattctgaccgtctccatgaacaaggagccaaatgagacccctgcctctttttcctttcaatttcctctgtaacataaaaaagccgctttcatccctcaatgaaagcagctttttttgtccgttcatatcagtcatataccctcaaagtgaaactcccatggccaaatagcagaatcactatacgatagaatatgttctagcaaccggattgactggacatctatcattttttctattctttttttcatgtgttcttctattctgtcttcgtttacaatatggttaaagtaaggaggaggtggaacaatgcttgaaggctggtttatgtggttaattttattttgggtcgtcgtgatgatcggattgctgtccatcggcggattttttatgttccgaaaatttttaaagcgcttaccgaaagaagacggccgatcagaactggattggcaggactattatattgaaaaaagcagacacttatggaatgcggctgacaaggcgcttttggatgaattggtcgcccccgtaccggagctctttcgggatgtagccaaagctaaaatcgccggaaaaatcggtgaactttccttacaggaggaagctgaacaaataaatctggatttaatcatcaggggctacattctggctactcctaagcgggatcatcaatttttaaaaaagcatctccgcgaaaaacagattgatcttacaccttatcaaaccttgctcaaataaaaaacctttccggcggacggaaaggttttaattcatctgaatatcagcggtcttcagttcattggaaagtttgcggtatgacataaacatcgcgatgcgccacgggacaatcattccgaacgccagaatccaaaacattccgcttaaagctccgtaatcaatcgtcgtgctcaaaatggatttcatagcgattctgataaccagcagcccaatcaggataaacacaaatgcttttgaccgttttaaatagatttcattatttttaatctcaaatttagatgtttttatcagaaaaatagagaagatcacgcccagcgtaatggcctccaaaaattcttcgcccgtcactctgaagatcggaaaaagaaacataagcgctcccgtactcataaaaatcggcgggagaattatttttttaggtgaagcgggcttgtcggaggatttaatcctgacgatcatcacgcaaattgccatagccgctgcaataacggatgaaattataatcatcatctttatcattcctttgcttgcacggagtttgatactatatactatactccaaaaacataaaaaaaaccaatttgaaaagaaaacacgtttacgttcccgtcaccctgcctactgcctccagcactttagaagcttcaaacggtttaacgataaagtctttagcgcctaattcaatcgcttccagaacaatccgctgctgccgcatggccgtgcacatgatgacatgggctttcgggtcaaaagctaaaatatcctgcagcgcctgtataccgtttttgaccggcatggtaatatccattgtcaccaggtcgggacggattttttgatataccgccagggcttcctcgccgtcagccgcttctccggccactatgtaattcgccgattccagaatttctctgattttcaccctcatgaacttggcgtcatctacaactaaaactcgtgtcatattcccctccacatatttaacattaactagtcttattgtaccaaaaacgaaagggtatataatagttcaaaagttatcgtttcgttacagccccttaaaccctccgaaaagatttgacagaacgatcagaatatagctcatccagttaaaaaacagcataatgccaatgacaatcataagaatgccgccggttctcatgataatcagctggtgcttacgaatccaattcattctggtaataaaaaatgaaaggacaagaaagggaatcgcaaatccgagaacatataaaaacatatatggtactgctgaagaaggatttgtaccggccagcgaaaaaaccgctcctaaaataggcccgctgcacggcgaccagccggctgcaaacgcaagaccgatcagaacggaaccgataaacccttccggcctgtgcttaaagtgaatgcgccgctctttcatcatgaatttcggctgaaacactccggcagtaatcagtccgaaaaggatcagcataatagccccgaactggcggatcgcttcatgataatgggtaaaaaaactgccgataaacgaggttccgtaccccagtgcaataaaaatcacggagaaaccgagcaaaaaacaaagtgtatgcacgagtccccgcttttgcagcatcaccttttctgttttaacctcgtccatgctgacaccagttatgtacgacaaaaaagcgggatacagcggcagacagcatggagaaatgaaagacagaaacccggccccgaatgtcagaaagtaattaaaactcacgatgacacactcctttcaagttatgacaaaatcatttcatttttttaacactttcctgagaaggattactttttatagaaaaagcttatataatttaatttgacatcaagatattatactccttcttatttgaaaaacagtataaatgtggatataataatagaaactcaggtgaaagatttatgtatgaaaggatatatccctgtgattagagagcatctattaaatgaaattgaaaaaaaacgggcagagctgcttaaaatcgtcatgtcaaacggaatgacatcaaacattacgatagaactcagccaggagcttgaccaccttctcatacaatatcaaaaggaactgcacaccggcagttggggtgaaacatgacgccaaaataaaaaaccctctccgggttttttattttataaccatgtatctctatatcataatctttacgtattatttcgcttgattattcatggctttcatcatttgattaattttcttttgagaaggtttcattcccatttgcatcatcatcatgcgtaacatttgttcattaataggcggattctttttcaaatagctcatcatatatttacgagcaataaaaaacccgagtgcaacacctatgagcaatgcgacaacgcccactaggatgccaacccataaagtcattttatttcctccttcatgttgtctagtttaaagtgtactaaaccaaaggctattatacaacatttacatctctttttcctcgattttagacaaaatttctttctctgaccggatttaaccacccgtagcgccttgtcttaaaatccatcgcaagaaaacaggggctgattttacgcagaatctcaaagaaaatcgtttccgcctcataatctcccgaagccgcaatctcaattaagctgtctttcatcatgaaggtggcgcggcccttttcccggggcagtgtaagccggtaaattgaatccaagcggctgtaactcatacggtttaaatgaagctggagatgctgatgcatatgtatcaccggaatcggctctgttatatattgaacttgcttttttgtcatttgatattcttggggtgtcagatttgtccaatggtagtctcgaaacaattcaaacatagcggtttcccgtccgaagtagtggttcgcaaactcatccttaatcaggtgtgtatagtaatgacgttccatttcctcatccccttttacagcgcttcgtattgctttctattatacaaaaggagaaaagaaagaattgtctattactgttacggcgccacttctatttttgtcgtataaacaggaaaaagaggatgatttgactcatcctcttttgtcttcttatttgtttagcagtttttttacgcggtcagccacgttttctgcagtaaacccgtattctttcataattgtttctcccggagctgaagcgccgaaacggtcaattgcgagaacgtctccttcaagaccggtaaatttgccccatccgaagcttgatcccatttcaatcgcaagacgtttcgttacgttcggaggaagtacgctgtttttgtactcagccgattgtttttcgaagcggtcccagctcggcatgctgactacagaaacgtgaacgttttcttcagcaagcttcgcctgagcttcaatcgcgagtccgacttcagaacccgtcgctaaaagaagtgcgtccggtgcatccgtttgtgctttggaaacgatataagcccctttttccactccggcatacgcttcttcagcctgctgatcaattgtcggcaggttttggcgtgtcaatacaagagctgtcgggtgatcctggctttgaacggcaagcttccacgcagctgcggtttcatttccgtcagcaggtctgatcacagaaaggttaggaagtgcgcgtaaagaagcaagctgctcaatcggttcgtgagtcggtccgtcttctcctacggcaatactgtcatgcgtgaatacataagtgacaggcagccccattaatgacgccagacgaatggcaggtcttaaatagtcagagaacacaaagaatgtgccgccgaatacgcgaaggccgccgtgaagcgccattccgtttaaagcagcgcccatcgcgaattcacggaccccgaaccagaagtttttcccggcgtagtctctggccgtgaagtctcctgcatttttgattgtcgttttgtttgaacccgcaaggtcagcagatcccccgacaaagaaaggaattttcttagcgatgccgttcagcacctcacctgaagatgcgcgggaagcaagactgctgcctttttcataaacaggaacttcctgatcccagtctttcggaagctcgcctttcattccgagtgacagctgttcagcaagctcaggatatttttcttgataagccgcgaacagttcattccattcctgttcttttttcgagccggcttcttttacagcttggttgaaatgcgcgtatacttcatccggaacataaaaatcttcttcaaatgtccaagcgtacgcttctttcgtcagcttgctctcttcttgtcctaatggagcgccgtgaacgccagatgtacccgcgcggtttggagaaccgaaaccgattgtggtcttcacttcaattaaagtcggttttttatcattctggcgcgctttttcaattgcagccgtcaattcagcgatgttatttccgtcctcaacataaaggacttcccagttcattgcttcaaaacgctgttttacattttcagagaaagaacggtctaaatcaccgtctaaagaaatatcattagaatcgtataatacgatcaggcggcctaactccagatggcctgcaagagaagctgcttcggaagaaatgccttccatcaaatcgccgtctccgcaaatactgtatgtataatgatcaactacgttgaatgaatcacggttatatgtctcagccagatggcgttctgcgattgccattcccactgccatcgcgataccctgtccgagaggcccggtcgttgcgtctactcctgctgtatgtccgaactccggatgtcccggtgttttgcttccccattgacggaactgtttcagatcatcaatgctgaggtcatatccgcttaaatgcagcatgctgtataaaagcattgaaccgtgtcctgctgataaaacaaaacggtcgcggttaaaccagcctggattctgcggattcacattcataaatttcgtccacagcgtgtaagccatcggagcggctcccatcggcatgcccgggtgtccggaattagctttttcaattgcgtctatagacagtgtacgtatggtggcaactgatttcttttcaattgtatccattataatccccttccttattgttgtaccttttcatcataaagcgatgctgactttttctcaactctttcagcttaaatttgagataaacttgttgaaaattgtcgtaaagcacagtctgatattagtatatacgaaaaaagaatacgtattgccgtattctttctgtttaatgaagattatttttctgttgttccctttttaatttttcaggagtgacatcattaccttccggatcaataacttttacgctcttaagcgtatttttcattgaggagcggaatcctttcaaatactcctggcgaagcttttgctgttcggctttttcctcatcagttatcgtgtttgatttagctttttgagccaattcgtttattctcgcgattttttctttagaaatcataataagctcctttggtgcgtgttgattatatactactaaaacgtagtcgtttttacaactgatgcacgtcagctgccttcgctgtctgcggtatattcctgaaaacgccggtgaaccgtggctttggacacatcatatccaaatcctcttaaggtggctgcgatttctgcaaaggtgagcttgttggctctcagtctgataatttccgaaaccggaacctcttttttttctttaccgctgttttcatgcctgtttttcagattccgttcaggtttatagccgttttttacggctcttttcattccccgccggatcttcatattgtgaatttttctttgatactcctcaacaatactgacgatttcgagtaccatcgtatcagcttcggaaagctccagctcacccttatgagccatcgtatatatttttacgttttccctgtaaatacaatgcaaaagcgcgatcttggcgtttcctcttcccagccttgtttcgtcctgcaccaatatcgcgtcaatatgtgattttttaatatcatcaagcatttcaaatactccgtcgcggtccatttcgtaaccgcttgctttctcagaaatgacttttacgacttccatgccgtttgccgcagcgatctccctaagctcctcttcctgtctttttaaagacgtttgctgctgttctttgtttgtgctaaccctggcataaatgatcgccttcatttctctctttcctctctaattaacaatggccagctgatatacggccggatgcttcttcttaaccggaagaataagttcgtctccgggctttatatcagcagtttgaagatgattattctccgtcacccactcaatgaaatcttctttattaatatttttcttttctgctacatgatccgcaagtgaccagagagtatcgccgtcctgaacctttattttaacatattggctgagcgtctgatcattccccgcgcatgaaacaagtaaaatagcggcacttaaaatcgcagtaaacagtccgacaaatatgatagattccttcgccatttatacaacctccgataagaatgtttgttcgctttttatatctttcagtatatacgaacaaatgtttctgtcaatcgtttttttcgaacctatgtttgtactgtcaggaaaatcatgctataatctacttaaaatcgacgttttgaggtgcgaaatatgacgaagctatcaaaaaggcagcttgatatcctgcgttttattaaagaagaggtaaaaacaaaaggatatccgccttctgtaagagagataggagaagcagtaggactggcttccagttcaaccgtgcacggacatttggcacggcttgagacaaaaggcctgatcagacgggaccctactaaaccaagggcaattgaggtattggatgaagaagaagtccaaattccgaaaagccaggtcgtaaatgttccggtaatcgggaaagtgacggcgggtattccgattacggctgttgaaaatatcgatgagtattttccgcttcctgaccggatggttcctccgggcgaacatgtatttatgttagaaatcatgggagaaagtatgattgacgccggcatttttgacaaagattacgtcattgtcaaacagcagaacacggctaataacggggaaatcgtggtggctatgaccgaagatgatgaagcgacggtcaagcgcttctataaagaggacaattatgtgcggctgcagccggaaaatccgacgatggaaccgattatcctgcaaaacgtaagcattttagggaaagtcatcggcgtattcagagccgtccattaattctattaaactttttttatcgtaaaacccctcacataggggtttttcttttgcataaaaaagagcaggttcgccctggcttagaaacgaacccgctaaggaggaaaaacttacatcatgcttacattcttattatccgacatctgacttttgaagtcaacaaataatgtttccctaaagaaactttttgtataattttcaactttgtatagatgttcgggctgaatttgtttatgtcatctttacttggggcgggaaatcaaatttatatatgaatatttagtacatggtacaatgtgttttgattacgcgtaaaaaatcccgctgctttttagcgggtatcaatttttaatcaaaatgataatattctacgccgtataaccctttaatatagacaggttcacagatgtttgaagagctttcaatcaaaatcctgtatttgtgatacgggtcaattgattttttatcctgcgcactgagatttaaccagctgccgctgtagcttttagaacttaatgtataaaaatttccgttcagcgccatccgctggagtttcatgtttaaaccgcatgaagagttgttcataatggtgaacttgtatcctaaaaagtaatcgtcagctgatacagtccccggattttcaatataaaactcttttgcatttcccgctagtgtgaagctcgtttttgatccgaattcagtggtagccgctttggctgagtgtattccgcaaaaacataataaaaaaacagcaatacatatccagcaccttttcaatttgcatcccccttttttacatattttaactcgtgaacacaatgacgtctatccatattttaagaaatcgcatactttataaccacaatataccagtttaaaaaattacggattgcctacaatgaagaataaacgaaataacgaaggtggttcaaatgaaacacgtaattgctttcgcttctaaaacagcgctcacacttgctttgctgtacattgttctggatcttatgtaccaagtaacttttttaaacgttctgtttattacattgatcttgagtttgatcacttattttacgggtgattacatgattctgccgagaacaagcaatttcacagccgctgcagctgatttcggaatttcattcattatattatggatattccttatgaatattggcggttttaatgtttctcctgccgcggcatcggttatttctgcactttgccttactgtttttgaagcattttttcatcggtatttgcagcaatatgtgctgcctgaagattatcaggccacaacagagacagacaacacgctattgagctatcaaaccgaggcgtctgaagagttaatgccggaaaaggatcctcaggaaaaaacataaaaaggaggcattcgcctccttttctttttatttttgcttctgctcgtccagcggcagctgcagcagtgagtctgtgcctgtcgctttcggtgtttttccgtcccatttttcaatccatttatatttgatcatttcatcagacattgatttttttataatttcgttataatcagcgatcccttccgcttcaatttttttctttttcgcttcggcttcggctattttaatttcagtttgtgtccgttcaagctcctgtgaagacttcacccttgcatcaatggcttcctgtgtggctttatccggcttcggtacgccaagcgtcagatcatcaattaaaaatccgagattcttcatatcatcagcaaaccttttttgaacatctgcagctgcttccgcagatttttgcccgtatgtgtcaataaccgagtatttgctgattgattttcgcgccgcgtcccacagccttgtttttaaatatgtattttcaatcgtttcaacgtctaccgctccgaatttgttaaacagatccactactttgtcaggctgaacgacatagttgtaagcgatatccatttcaatatttttaccgtctgaagttgccacttttatattttcattattcactgtctgcatacgcaccggatattccgttactttattaaataaaccgactaagtgccagccttggtccaatgtttcggattttaccccgccgttcggtgaatatacaaccccgacataaccattcggtattttttcaatgaatagtgacgctgtaacgcccgcaatcaaaagggctgcgcctattatcacaccgccgagtattttttttgtgtttctccgcttattttcgctcatgctgatcttcttcctcccatgactttttgaattttttggctttgcttcccacttgtttaaagataggactcagcatcagccataaaccgaatccgataatgacaagaagaatgatagacccgatcatcactttcatttgcccacctcttttctttcatcctgtcagttatgtatacgatcttaagaacttaaagtttcataaatttcaaaagaaaaagctccgccacccaaatgcggcgtgcttatttataattgtcactgataaaatcagaaatcgtttttgtgaattggtaaaaggtattgttctgtgtggacgctctgcttttcagcgtaaaagtatcaaatagtgattttctgaagccggtgctcatttcgatttgaatactcaacccggatgaagaatgattggcaaggttattcggactgacgcctgcatacttatcattcgtgtcgagaaaaacggcaggatacccatgccctttcagcacatctgtcaaaagttcggcccgtgctctgtctgtaccgccgatttttatctttttatcgacgctgccgtagccgtgcaaagaaatgacatttgagtgctcttgcaccatttgaacagccctaggttcgtcaaaatgcgaactggtcaaatgcaaatcagcattaccggctgattttaatccttcaaataaatacaagctccggttttcagcaatttctctggctaactcactggtccccggctctatgcctccgccgtgtatagctaatatgagaacataagggtcatgctctttcgttgaaatagaataaacggagggattctcatgcagctttaatttctcgaaactgccgtaagtatctgaagcggcatcagcccgtaaaaacggcagaagcaaaaacgataaaattaaaactaaaattccttttttggttattgatggcaattgtatgtttatgttacaatacaaatgcttcagcctttgaagcgaacggcagaacagggtgactttggacggtttcttctgctctgcctctttgccagcagctcggttttctcttctaaccctttttttcataacatcatcctttcttttatttacacttttgtcacaatattatatacgttggacaagacctccgttcatcttaaagaataaaaacatcagagcagcctccatcctttacgtaaaaagcctttctgttcagaaaacggaatgcttacatgataaacatgaaacccttctccctttgttccgtataaaacaagaggaggatttttttatgaaagaatacgaatttgtaaaagttgagctaagcacgatgagaagaagaccgaaggaggactaccgggaaatcattcatcaatatgctgaacgcggctggcgtctggttcaaatatttgctcccagcatagacggatatggggcagcggcttatttcgaaattatatttgaacgtgacatatgactttttatttccatagaaaaaagactgccgttgagcagtcttttttcattttattttgtgcctgttgatcccagtcctccgcggtccttgttcccgaggttatctacttcgatcagctccacttgaggcattttcttcatgattctgaattggcagatccgctctcctttggaaatgtcggtatcccgaagtgcgtatgcaggaaaaaaccagaaatcattgtcacctttataagattcatcaatgacacccattgaatttgtctgaataataccgaaatgcttatatgtacttgaacgcggaacgacatgggcctcgtatccttccggcagctccatcgcaactcccagcggaataagtttgaattcgtcttttttgattgttatatcctctgctgcccgcagatcaatccaatcgccctgttcaattttactgattctcgtttgtgtatcatctgaatatttaattttgatttgtaaagtcatgttcgctgctccttttgattccctattttagtcgtatttatgaccaatccgtgccccattataccatttaacgttgctttttgaagccggagcagctgaaggaggattaaccgtgaggaaaagaaaatgcagaattgagaagaagcctgaaatgagggggacaccccctgtcaggcttttgattgctgttggtaataataaaaattatacttttgatcaaatgcttcttcgcttccgcacagataaataataaattcaataaatgcaataattgaaggaattgaagtccagcaaaacaaaagatagagaattccttgtccgactcttcctaaataaaacttatgaatgccgaaaccgcctagaaaaaatgctaatattgcagccacaatcctgcttttcttacttaccatcatgtcctcctatgagtcttttttcgtcattttcatatgacagctctaattataatacaatttctctatatagagtaaaattttttatatattgttactggttttcccagaactttttcagatccgttcttttcactgaaatattggcatttttttaaaattcacccgggtgcaaaaaggaatttcgtcccgaacaaagaatttgatgaataagcgcataaaggcgcgcggctattttctgtcctctgcgtcaggcgcttatatcaaaagaaagaggtgtctttagaatggttcaatttaaaaactttcctgatccgtctttaaacgccgcattgcagtctcaccctgcccattcctctgaattggaacatctcaaagcaaggatgcagaattttattaagcattccgcaacagatgataatcttgagatcgcagatgcccgggtgacggcggaaggaatggtcacctcacttttaaaagatcggcttgatacagaatacaaaatgcttatgaataaaatcacccgggaagtgaatgtggaggattacggagcggtccctgacggccgggacaatacggaagcctttcggagagcgatcgggaacggccgcgtcaaagttaatgttccctcaggagaatttttggttcaagggataaaactcccttcgtggacaaccatctccggtgagggacaagggattaccgtgattaaactccatgaggacgctcccgcatatgaatgggttataactaacaatgattacgaaaatggaaatcgtaatatttttgtagagggcatgactttagactggaatccggatcgtcaatgcggagtcagaaacccgggaggacagttttccagctgtttaacgtttgctaacgtgcaatacggctggattaagaatgttgaagcggttaatgcaggtctgcatggtattgatatcacatctcccgcttacgatcatttgcctgaaactgaatggacaaaagacggctgccgttatatatggatagataactgtgtggcgtacggcgccggagacgacggcattaccacccattacagcgaatatattttcatttccaactgccattccggaaatccccgcggcacagagcatgccgagggcagcgcaaattcgaacggtattgaaattgatgacggctctaaacatgtgtggcttttgaataactatacgagcggaaatatccgcgggattgaagtaaaagcgcacagcctgtggccggcttctcaaaatgttcatattatcggacatgtgtcatatcgtgatgtacgttcttttgatattcgtcatatcggtcaccaccaagcctcagaccctgaaagcacgacggcttatgatgttactttaaccgattgcaccgcgattgaaccggttttcaatgctctctatgacggtgtaaccccgcgggcgctggtcatctccgcctataaaaatgtcaatgtaaacggattcacagccattggcgacccttcatacgactatggagggaaccctgtcgtagctcttcaataccgcagtcaaaatattacgatcagcggcattaaaatacgcggctttacacaagccggtgttgacatcaatatatccggcggatcaaataaaaccgattatgttaaaatttcaaattttgatatttacaagtcttctcctaaagggatttcaatcggcggagggcaatataacgtaaatattatgaacggaacgatgatcggagacggcggttccgtcggaattacgtcccctaacagtcaggctgtcattctcggcgtgcaggcggaaggttacagcgctgccgcttctataaaaggacagacttacgagcagatcccggtcaatttaaagggaggcgcacagcttgcgacgagctctggttttgcatttaacccgacaagcgccgttattgcgggaacaggcgatattacggcaaagggtgacagaaatgcgatcatcagctcttctggaggttcaagttctgaaggttcaagggcatttatcgccgcttcaaacaatgcccatattacgggcagtaaagtctccagaacaattctgtcatcagaaagcattaccttggaagaaccgtacacagttgccggagggcatcagtccattaaatggaaactggactcagcgggcggccacggaactttcgccggagctgtcacctcttccctgtcaggatacggagaatattttgaaagtgtaaacggccagtttatccccgtcgggacgatcgtcacagtaaggggagaaaaaatcgaaccggctcacgttggagattatatgctcggcgtcatttcagaaacagccgcttttatatcaggagctgcaagcttcggatggcaaagccgctttttgacgaacgagttcggcggttttatatatgaaagcgtgactgacgaagaaacaggagaaacgatacgcgtgccgaaacaaaacccagactacagcccggctcttgaagctgactatgaagcacgtgctgccagggacgaatggcatattgtcggactaagcggccggcattacgtacggattgacagtacggtcaacccgggagattatatcacggctcataacggaatcggaactaaagccgcggaaggctggaaggtattgaaactgacggccttatacagtcctgaaaaagggtacggcattgccattgcggttatcaaatagcggttttaatatcaggatcatctcctctcttatctatcggcgggtatggtcctgttcttttataccgaacgagccgcctctttttaagcctatcgtttcatttgtccaagccatcaggtccttcagtcatagaatattaccgtcagatgaaaaaggaggatggatatggatatggatatggatatggatatggatatggatatgcattatgatcacggtgaaaaagaacaaaagcagcctaaacaaaagaaaaagaaacaagataaaaagcatcttgattatgattacatcgtcgtctataaaagaaaatgcaaaaaatactgctgacctgatatatcaacgcttgttacacccggtaaacaccgggtgtttttgttattatgcgtttctgtataggcatggaaggaatacagccaaaagagttcaggtttccgggccattttcacctaaaatccggtcatcctatcacgatacataaaagcattctattatcttcttcccatccccgccgaattaaaagtattttatttacagaaaacaacacaaatagaatgacatgacatttgagaggatgtgctctttgcttgattaatttttctgcgctaccatgaatttgcaacaatttttcaaaaaattccctcaggaggtcatagtcatgaaaatcgccagaacagcaatcggatcatgcttagctttatctctaacaattcctttcacagccagtgcctcagcagccagtcagtctgaacacgcgaatgcgcctcaagttgcacccgttgcaaatccgttagaaagtaaattatcccaaaaagcagactcaaacgtgaaagcagcaggtgtggatgccgggctgaatgtagacgtagatgttctcggaatctctgatcgcattgctgaagcggttaaatcaaatcaaaatcgaaccggctgggtaaaaaatgtcatggaaacaacattttacgcatcaggacagaagtataacgtcatggtgtttaatttaaatcaagaatacgaagaccgctttaacggcgttcaattttacggatcagccgtttatgacggcattacttacggaatctgggtcttcgaagacgggtcctttgataacaagggagacggaggctggattaactgggcattcagaggctggttcgatcgtgataatcagcatattgaattccacagaccttaacacgaaaaaacttgcggctgcgcaccgcaagtttttttattgcaccggattgttacacatttttcacccttataacgactatacttgaagtgcgggcctccgatcgcggacccagtaaagtgtttcaaagtgagggtgcgtcatgtcaaaatttttaaaaataactttgtggagtatattggtgttgatcatcttgttagtgattatcggaatcgtttcttacaatcaaactccttccgcaggtagcacagctgaaagaatgcttaatgacgtcttatcagtttaaagttctgcatactcctctatcgattttttcatttctttttataatttttcagaaaaataaactagcatccctatcaaacttttacattcagcataatatgtattaatcctcttaagggaggtgagatcatatgggcggttatggtagctcctttgcgttaatcgtggtgctattcattttattaatcatcgtcggggcttctttcctcggcggttattaagagtccccttgcctctgcatccatgtgagcagcaccttcatgatcgtacggcgccataatgaattttttatggcgctttgctgtttcctcatttaactaactttttcaaacgaaaaagatcggcaatgcatgaacatgctgccgatcagtaatttcatagattattttgtgaggtttacatcgatgacgttatagaaggcattagaagtatccgcaacatcccacacccctaaaatgatatggtaaccgcttcgatcagtcggcacaaaaatcttatgagtcagattcgtatctgccttggagccgtcgtggtttaccgtcccgattaattcgaattcatctcttgacaaaggtttattcggattccagtttttcttggtgatataatagtgccactttgatgtcgcatgaggtgcggtgtagtgccaagtaaaggtgttaaagccgccgcggatgttttgttttacccaatgatctgcagtctgcttgtccaaaccgaaatcaatttgtccagatcctccgtttgcagacgcaattctaccatccggcggacctgcagccggaaatcctttcggcccttccacagactgaggattatcaatgacggagccatatttctgcgcagcagccgtccagcccattgtttgcttctctaatgcccccatgtacgctctgctgacgggctcttttatatacccgtgtgcagacgcatcacttgaatagaaagcgcctccaataccaagagtaacagttaaaactgcagctttgactaaacccttcatctctacgtcatcctcccttttttgttaatgaaaacctttcagtatatacatttcacgatggagaatgaaaagaccttccttttcttgataggaaaaagcaatgaggtttgcgctcttccctttgttttttataatcataaaaaaagacgggccgtttctgtggtcgaaaaaccggcccgctccgcctgacttcattcaatcgcttgctttactggtttcttttcggataaccggtgctacttctgttgctaatcgttcgatgttttccgcggcttttttaaacggcataccgcctatatcgatttgcgcgaggaaccgctgatgtccgaacagctcgtattggtgcatgattttttcaatgatctgctgtgagcttcccacaaataaggctgtttctttaccggctgcccgctcaaagtcttccttcgttaaaggctcatgaatcccgtgatatgaatgtacacgggaccagtaattagaatgatacggataaaattcttgtattgcctgttcattcgtttttgaaatgaacgtatgtccggttacggcaaccttcacattttccggcggatgaccggctttagaagccgcttcccgatatttgtcaacaagcggtttagatgacctcggatcaccgctcagtacagctaatgccagaccggcccctgcacttccggcccgttccgcactttccggagtgcccgaaacacctaaccacagcggaatgcttccgtgaaaaggctgcggggaaatttctgcattgttaagcggcggccggtaacatcctttccaggtaatcacttcttcctcggagtttaatgttaaaaaaagctcaatgtgttcttcaaacaattctttataatgacccacgtcataaccgaaaagaggaaacgagtctaaaaatgccccccgtcccgcaatgatttctgcccggccgtttgatatcagatcaagtgttgcaaaatcctcaaataaacgaacgggatcttcggtagataatacagtcgtggcactcgtcagcttaatgttttcggtgagctgtgaaatcgctgataagatgacgggcggcgatgacaccgcataatccagacgatgatgctcgcctacgccgaatacatcaagacccgcatcgtcagccaattttgccagctttatcaattcatctaaccgttgctttgcgctgactgttttccctgtcagaggatcggggtataattctgcaaatgaataaattccaatttccatacaatcatgatgttcagccctcacatttctctcctcctgcactgtgtaaaaaaagcttttatttgttattctattcagccgttttcaaaaaggaattcatccaaataaatacaacagactagaatccagaagttccgatgtttctggccgccttatgcttatgctctgctcattagattcctgctgccggatagacccggatgggataccgtcccgagcaagaacacagccattcgaattcatgtcatgcgttcaatcttcaatccaatcatgatattgatcataaagcggacgtattcttccggcatcacgagcgatgacttcacaccctctgtcatcatatataaagaaaataatgtcttttgtgatattcacaaagaaaacatcgggataatcaacagagtaacccccgaatcttggcttcagcggaaaatcttcgtgggcagctgccttaagtaattgagtaatacgcaaatctttccgtttacatattaaagaaaactgctgcatttcgtattcttctgcatcatctgcttcaaacgggtacgggcatgttttcacctgaatccgatataaatcatccttacacttcagaaacggctgataaatttttaattttcttgcgtaaatatccttagttttgtacttatatacatttgcaacaagaaataagtcatcattttgttcaaacagttcatcgaaaatagcggcagtttgatgatggacaagctgaaaataatcaagattcaaacccccgctttcatcaaattgatacatattgccgccaagagaaaaatggatcccaacgccccattggtgataaatgccgggcattaattttagagttggaaacctttccttcagataatcctttatttccatttaaacagactcactttctgttattgatcggctcacttttttctttttcgctgttgtaatattattccgattggaatacaatgaaatagaacactgtaaaccccattgatcaggatggatgctggtcacattcatcttgatccttttttcacaagctcacctccactgcggacccttccatttccgaagctgctcattgattttacacattccagggtattactttcttatacataagcagcaagtgactcttttatcgacccagatcaatttagaaaatcgagaaaaaacagacaaaactaatggttttggatgaaagagagggttataccgccctttttacttcagtcataccaatgtattcttttcagtttaaatttttctttataggactcatgatcggttttccatgctgcttcaacagtgatttcatgaccgattacttcattttccggcatatattcaaacgtctgaatatgatcttcccccgttccgccgccttctaatttctctccagtgtattctgaaagatgatagtctttatcttcttcatatttccggccgtcaataaataatgttaatctcttaatcaccgttttcttttcattctctttattgcctctgtagtacaaattcaagaaataattaggaccgatagaggtcttgcctgatttttcaattgacgcttcccacgtcttgttctggctatagccgatatatttgactttctctcctgaaattaaagaaaacagtgcaattccggccgttatggtcagaacagtgataataatcagcaattttttaatgactttatacttcttcattgcatcccgcctttatcatttagaacgtatggacattagaattgttacatttaaattcaaaaacttaataaatagaggttcagattccagtcatcaaaaaaatacgaaaaataaggccatattcccccttagcagattgccacgcgatcatgataaaagtcgtccaaaaaattgtgactaaaaaaagcataacagttacaatcattaaaatgagacaacttatcgatagaactgagtctttgtttttgttaagaatcagagtaactgctgctccggcagcaaatatatacgacaaaatcgcgccgatccaataccatagcattgagtcattgctccaataagccattgattgcatataaatgctgaatataaatcctatcaaagctaatacgagcgaaactaaatttgacttcaagtcagagttcctttcatcatacgttttattttttagcaacgacttcggacaacgccttctcatcattagctcctgatcataattaatgtgagcaatacaataaaaaccatcttcaaataagttttaactgaacgcagatgtacttccccatcatttccaatgagattgacggcagggactttttaaaaattaaatagatgttttatacgcgttcattgcttgatttctcaaaagcatattatctttcgtaaccattccaagattgtatgcttgtttgattatagccaacacttgattatcagtttcagttacagctcgtcctccagttattctggacttccagtaatcgaactggtgatgtaactctgaactgcttttaaggtttttatgatcaaccactttcccattctccagcgcatctttaaattcatcaaaattaattgaacattgctgattcgaactgattcctgcaccttctgtcgctaaactgcaaaacgctaaaaacttcggatctttcgtgatattgtaagagttatttaggccttccatcacattcaccctctctcgaattttacaacgtttgatcgttactaaactaagcatttttctccaatttcgcaatccattggtattatcggtaatttaattgaagaatttaacttaaatgcaaaaaaaactgcctccggcaaggtttttttcgtgttgaacgaaatagaagagatatgaaaaacagccgcctggacaaaaagctgctgtgctcgttattcagctaaagatttcttcataaacgcaggaggaaaatgggagattatttccccacaaattctattaactatgtttttggtttaaccattctttctttagcagtgcgtattggaaagtgttttcatatttaggtgttccatcctcgtatttcgtaaatgaaataaattcaagaaaataaccttctttacgcatacctaatctttcagataatttttgtgacttgtagttatcatcttcaacatatgcataaagccttcttgcgtctttttgcataaagagatactcaaagaaagcctttgcactttcactggcgtatcccatcccttcaaatcgagcattgaaattccaacaaacggaataagtatcaggctcttcttttaaataaaatagttctccgatcaaatcattactgtcttttaaacaaactgcaatataagaatcatctctgcttcttttttgaacggttaaggaagcttcttctatcgtagaaattctgtcatcaagaaagcagttcactctcggatgtgccgaatattccaaaaggccttgcgaatctgcctcggtaaaatttcttaaaattaagcggtgggtttcaattttttgcacttgttagtctcctatttttgaaatgaacatcttcaacaggcctcgcccgtttgttaaagaactatctcaatctatttgtactatacggttttttaaaaccatcctcatttcttataatatggataataatcaaattaagccattaattaagcttattgagtaatttttcaaacttattcacgctcataatttcatgagtgagaaattctccattataaaacacgctgaaagttgtccagatggccggtgatgtttgcgccttttcttttgatgataatcgatgggcctgaaaatgaagccctttcttttcagtcagtttctttaaatcctctaacactccgactgcaaatgggcattgagctgtataaaatattgtgatgccctcatcattaacgaaataacttttaacctgttttttaaatacaggaggagctgcatgttcattccaggtcaatgacattaactgaaaatagggttctgcttcatcttgcaaagtaaatcccatatgctcgaagaattgcttatcacttaaataagggagttttttcttaccgactatatgaacgattccatccataccgcgggcctttgcatctgccgcacatttatctagcaagtgtttcgcatggccgttattcttatatctccccgacacccaaagacaattaataaacataaaattaggtgcgcttatcggaacccacgctttttctgcaggtaaatattcaataaaaacttttgcccgttcgtttaatcgataaaataccaagccatcagccattcgatctttgagccagctctttttttcatttaccgccccctcatattgtttcgcacctaatgcgcagcaaatatgattgtcatcaatattctcctttttcaattcaatgtattccattttctcctcacctgctttctggattcatcacatgatttcaacttgtacaatgcagactgggcatggcggaatgagtgagcatctatattagtagtttcggtccgtcttttttacccggcgatataaattgtctataaaacacactactttcgcagaaatatagagtcccaaaaccaatatattagcgcagcaacaatgctcattatgtaataaatgaaattctcgaaaactctaacatcaatagacggattgccaatgcaccaaaacaagtacacagctaaaaaagcggctgctgtataaatgaaaagatgaatcaacctaaacttttcaggcttctttcttagccataactgcacaggaacagcaaataaaaagtaagtgatgaacgcgtaaaaagcaatgataactaccgtgattaatgcaatcggcacaaaacctgagtatacaaacatatacaatccgaagatcaaaccatacgagaagcttgaaaaagccaatgtgagagcataacatttgattttgctccaagtcgccattttcatttatttcacctgctttttaaactaaggtctcgaatttacaatttctccccattgtttaaatcagtatatattgatcgctttaaaagatctatgtttttttagacctttcttgcagatcagcaattcaatcagtttaatatctaaatacctgtaaattttatggcatgaaaaaaggtcaaggttataccttgactatgatcttgtaacctgtagtaatcctacatggtgtcagccgcgctctttcaaaaaatcacccaagacattctttgaatggtgaaacggaactaactctttcaagaaagccccgttatatgactattccaagttttgatcaatagttccttcaaaatagtcatcgctgacttgttcatgtgtttcagccaatcctttttccaattgcgttgttccctcataatctgatgaatcaaaatattttccagcgacatttgttgtttcagtttctttatgattagtttgtgtttccgtgtctgcctggtttgttttggtgtcgccggccgatgattgctgctgaaaatcataatccttatccaaagaagaaaatcttttatagtcgtccggtctgtctgctccatttttttcagccatgttattcactccatattaaaaaattttgttatttcatttgtttacggtttgaactttgtttgggatcatccgctttaaaagctgtttcggtctcatggtcttttttcaattgttcaatacttgaattttgaattccttttttgctcattggttctcactcccttaccaatagaatatagtctgtttgtattgtgtctatggagatcatattcatgcactattcaatgaatttttctaaaaaagaagcttcagacaaaaaaggtcaaggatgtacctcgactatgtatcaggctcaccaatcttcatccggctcatcatgttcgaaaccgtaaaagcctttaatccatacgtcaccgcatccggctccttttgtgatctttaagtaatggtttctgtttgcatcaccattcaccttgtcagatgcgcttaaatgtaagtgattacccgtaaaattcttttcactaagagtaaactcataccctgccagcgtgattcgctctgaagtttaacattcaacgtacagccttctgcattgaaaatggtaaacctgtaccccagcttagtcggccaataccgctcatttgtgtcatcggccataaaaaatcccgcttcattctctgtcattttaaagctgaccttatgcttatcttttgttcctcctcttccagattatacaattttaacaatccgatgatacgtacttcacaaaaaacaatccccttctaatgagatggggattttctgtcagctttttcttgtgtatctacgtcggctccgtagggaataaacgatttggtgcacttcgcggcctcctttgagagcgtgtctatactatggaaattccgttcatggaagacgacaaaaaatccgtgggaacttccctgcatgccgcctcaatcgatttttagaaacacttgtctgcaaataaatgtaagggttttcaaaaggaggttattgtgctaaattgtaatccaagtattatttttccaataaatgaaaggggtgtattttttgaaagccgtaatagcgacgaaagacaaaaatatagcgatcgtacaaaaagaattacgtcctttgcgacatggtgaagccaaagttaagatggaatactgcggtgtatgtcatactgacttgcatgttaaaaatgctgatttcggggatgtgacaggcgtcactttaggtcatgaaggaataggcattgtaaccgagattggtgaaggcgtatcaagcctgaaaaaaggagaccgcgtctctattgcgtggatgtttgaaagctgcggccgctgtgaatattgcttaacaggccgtgaaaccctgtgccgtgatgtaaaaaatgccggctatacagttgatggcgcgatggctgaagaagcaatcgtagcggttgattatgcagtgaaagtgcctgaacatttagatccggcagcagcaagcagcattacttgtgcaggcgtaacaacttataaagcagtaaaagtcagtgaaattaagcctggtcaatggatcggtgtatttggagtcggcggtttgggcaacttggctgttcaatatgcaaagaatgtctttaacgctaaagtgattgctttcgacattagcgatgaaaagttgaattttgctaagagcttaggtgctgacgcggttgtaaacagtttaaacgaagaccctgtcgagaaggctaaagaagtgaccagcgatttaggacttgatgctgcggtcattaccgctgtctctaaaacccctttcaatcaagcgattgatgttgtaaaagcaggagcgcgagtagttgctgtcggtttaccggtagataagatggacttagatattccccgtcttgtgttagatggaattcaggtagtaggttcattagtaggtaccagagaagacctgaaggaagctttccgattcgctgcagacggtaaagttgtacctaaagtgacaaagcgcccgatcgaagacgtgaatgatatatttgaagaaatggagcaaggtaaagtgaccggccgtatggttatagattttacttgttaatatataagatttctaatcattgtagctgccgggaataagccggcagcttttggttctattcttgctcattgccccatcttgactgaaagagacttgccaatttaaaaaagaagttttaagagccgcttgacggttattaatttgcaatgactatctggcctcatcctgataccaatataaagaaaggtcattcattgccaaagcgtaactttgttgtcttaacatagttgttatgttacctcgatgataagtaccgtgattcgcaacatggaataaaatttctgagtaagcagtttctctggaacctaaccaaggattcttcaaatttattttttgttcgaaatctgtttggctattaatccattcttcaaactgtgaagccagttcttcataagacttagtaaattcttctgcagaatataaatgagacctttctgcataagccatagaaggttctaatgcttcctgcatgtctattcctttaagtacttgcagccacataacatccgccgcgtagatgtgactaaacgtttgtgcaattgtaggatatgaactgcgaacctcttcgtaaagaacgccgcttggtaattccttcattctttctaatagcgccttattcgcccaaacatggtactgatacatatttttcgcatggttcatttaaacatcttctcctttaagttgatacttgcattataaaaaaagatgtatgacagcagattgtcatacatgtttataaactttcattattttttcggcttcagcgattaattttgattgcagctgcgccggttctgctataagtttggcttcagaacatgggggtgaaatcatcttcatgctttgaaccagtctgctccagtatattatgacatttttttgtctaccttaaaatttccttatttccttagactgaaaaaggagggatttttttataaatattgtaaatatataactgtatcatattcactattaagaggaggaatactaatgaaaaagaaaattattgccggtgctcttgcttttggattaattccactgatggggactgcagatgtatctgcaaaagccttgccaaatcaagataaagtcatgaaacctgctggctggtcatgtgacgctccgtatattgcttgtcagcctttttctggtggtactggtaaggtttcattcaactatcagggcagctctccggggaaaatcagagtttttgttgcgaatgacggcagcaaatctttcaaattcacaatttattatcctaatgggaatacactcttatccactacgacactgaatgcagggaaaacttttattcaagaatttagtgttaaccaaaaaggagaatacctcctgaaatatgatagcggcactggtgatagtgtcgatggtttctttagatctgttgagatttaaattttttaggaagtcggctgttttgccgacttccttttacagccagccattctcttcaaacctgatagataatgtgtctccaaacggcctcgcacttccactcatttgattcttttttgttatttgtcgtatattgcgcttgcccgggaaatgaagaatcattatttctgatttatttcccttaccttattcattcatgcgaggtaacttcctaaaggagtgaacatgttccaattaagaaatcgcaaaggtaaaatggcatcccctctttaaaggttcttactcttaactaaacattcatgtccattgcttaagaaccgaaagtgatatttcattcatcaatccttctttttaaccctcaatttagacaaaatcttcattttttctcctttagacttacatctatgtcgaaatttatcgttcggcatattatatactatcctaacaacaggaggtggcaatatgggaaactacggtggaaattatggtggaagctctttcgtattgatcgttgtgcttttcattttgttgatcattgtaggtgcttctttcctttattagtacattgacgaaccatattcgtctcccaagaaaattgcatctctcagttcggacagacgccataagatctttttatggcgtttttacttttgaaaacagataaataaatattaggagagttttctccctttctatagctgctattgtcttgatttggctacatacaaaatctcaatagctaaacaaagcacgaacttttcttgggaaaagcaaccaggcgctcttatgtttctggagggacaaaggtgatactggcgcaacaggtgctgccggtaaagattgaaaatctgcatatgatttagctgttcagcaaggattcattggaacattagatgagtggcttgctcagttaaaatcaataaattaaacaaacgatctcctcctcgtaatgagagtaagggattttcaaatgagaaacccccgaaaaccttacatccttttacaattttttcaatagctatgttatgattatcctcgagagatttttgaaattttcagaaagaggggtttggatgagcaagatcgcttcagaagttgttgcaactacactgaatgattggtacattgctataaagaaacaaaaggtagatgagtcaataaaatattactcagagataaagaaactgtttgatgagatggaagaggatcaagaagttcttgcatattacagtttgttagaagaaagacataaaatgttactgcattcctcacgtggagaaccattaccaaaacacacttatttcactgcagacaatgaaagtttcataaaaagaacaaacgataaattggaatataacttttatttatttgaaggaatgtacgaggcatacaacaaaaactatgatcgagcaattaacttatatggattagctgagaaaaaacttgcagaaattccagatgaaatcgaagcagctgaattttactccaaagtctcctacttatacactctagttaaacaaagcattgtggcacaacactatataaagaatgcaattacaatatataaacgacaccctgattataaatgcaaactggctacttcaacaatgattgcggctgcaaactatgctgatatgaaacggtttgaggaatcagaaatatattacttagaagcaattgatattgcaaaagaaacaaaagatgaatttttagaatctcagttatttcacaaccttagcattgtttattctgattgggacaaacctgataaatgcattaaatctcttgaaaaagctgtaggaaatgaatcctggttgaattcaatttattatataaattctttattcatgatgattaaggagctatttaaaattgacgaaaaaatgaaagccattgatttttacaataaagcacagggaagactcatattaatggagaataagatatacgaagccaaaatcagcatcctataccacctttattgtggtgagttaaaaaataacttcaataattgcattcgttatattgagtttttaaaacaacaaaatgaccttgaaagtgtagatgaattggcctacttagctgcaaaaaggtttgaatcaataggtgcttttgaagaagcaacaagctttttcaatgaaaagatttgggctgaacagaaaatgaatcaggtggagggaatcttatgaaaaaaattgtgctttgcgtatctattttaactgtaattttaagcggggcagctttaacgcaattgagtacggattcaccatctaacatccaagtagctgaaaggccagtcggaggttaaaaaatgaatttagccctgctcatatgagtgggctttttattttgtctccaccagtcagcccatctctgtgaaagcgcagttccttcaggtgtttcttttcttttcattatccaattcaaataaactcaactattgttttggttcgatgacatccactgcaaagctcacttttgaccaactttattatgtccacgtgccttcttgcgacttcctcacaaatctccaagagaacagctttaaccccttcctcggggagcgccaatttccgacaaataattccctatacatgataatacagttgaaacattattattctaaatttcttccaattcaactcttctttattcgaccaaaacaagaacaaaggttcaatttaaatgtggggtaataaaatttccctgtgtcccgcccatgcctatccagctaagcctgtttaaatttaattttacgtgagatttttctaaaatataaggtcagtttatttaaaaacgggaaaatcccatattaattaaaaatacgggattttaataattcggtttcttgtttaacgtaacacttattcgaaaaaaattcattagttaaagaaaaattcagattccagcctaaacatcttgtatcgtccttcaagttacaaatgattcaagcaactccttgtctcttgttaactgacttcataaatgcttgatatgcttgacaaaaggtatcttttacacctgagccatccgactttcatcaccacataagcaaaaggtaagctccaatatttaaattaatgtgcgccacttaatttaactagaatttttgcttgagatttatcattaattaacgcatcaaacccttgttcagcgatattatctatatcaattttacttgtaataattgattgcgcgggtaatcttccattagcaaataattcaatgacctcattgtaagtttcattgctgtatcctacagaccccattaattttgcaccactaaagattagtgaagcaggaacattaaattggatatcttgcgtgtggaagctgataaccatcattgtgccacgaactttagttgattgaatagcttggtgaaatgttgactcgacacctgcagcttcaattgcaacatctgctccatctgggaataattttcgaatttcttcaacagggtttacttctttagcattaaaaacgtgtgtcgcacccatttcagttgctttatcaagtcgactattaaatagatcaataacaataatattagacgcgcctgcagcttttgcacctaaaacagcaaatagcccaataggacctgctccatagacaacgacagtatcgccttctcttacatttgaatccttaatggattggaaagatacagctgctggttcaaccatggctgccaattctagcggtaaatgatctggaattttaaaaatcgttttttgtggaagtatcacatattcagcaaaccctccgtcgatttgtgcaccaactgcgtctaaagtgatgaaacgttcagtttcagcatttgaaggatctttaagcatcattgggtagatacatactctgtcaccttttttaaattttgttacatgagagccaacctctgcaatttcaccagaaaattcatgtccaagtaccgtcttcttattcattggtactgaatctggatgcaagtatgcatgcaaatcagaaccgcaaataccagcccatgccactttaatttttacatcatttggttgtaattctttcgttcctctttcctcaatacgaatatctctttcaccataccacactgcagctttcatcaaaaatcctcctttaattcatttttcaagcatgaaagcaattttcttttgctcttacttgactcataactcctttcctcctttgctatgttcattaatctatcacaggttttgacgaaaacgatgagcaaaaaataacacatgtctcaaagtgagacatgtgttttaaagtggttcattaatctataaattcttagaaatctgaattaattcttcttttgtatatgaatattcattgcttaaccatttttttataatctcaaaaaaaccactgcagtagaaatcgcatagtaccattgggtaatcagaattttggatttgtttagaaagcggatcattatattccattgaaatttcatataaattttctgcaccaaattgaatcaatttttcgtataactcaaggctattatttttactggtaagattaaaaaacaattcccgattaagatctacgtattcgattatttcctcaaacaatgtatgttcttgatctaaacctccctttgtttgttcaaagaggtttatcgcgatggaatttgatgcatcactaaatagctcatatttatcttcataatgacggtaaaatgtgcttctatgaatcattgctttttcacaaatatgattaattgtgatagatgaaaatgttttttcttttaataactccaaaaacgcatcctttattatggtttgtgtgcgtaaacgtgtaaaattactcaattcaagtttcctcctatatttaactcctaagtaatgattgaaattttaatagtttgcataatcctattttcttttagtatgcctaaattaataataattatgaaacgagaagaataaaataaacctggactcatgtgaagcggaaaggttttataatttcctgcacttgttcttttgtcctactataatatgtccaaataaaagcccagctacaagggcattccccataaaaaaagccggaatcctccttaagaggttccagctttttttattgtttgatctttgtcagttcagtggaaactttttatcattggtacaaatgctgcttccatcaccagtaacccctagtttagggcatatgaagggggtatctgacggcttataatatttcaatgcagccttctgttccatgaacgcggattcgctgcccatcttttatcaatctggtagcattttcaactccgacaactgcaggtaagccatattcacgcgctataaccgctccatgggtcatcagtccgccaacttcggtgaccagaccttttatggatacaaacaacggtgtccagctggggtcagtaaaggaggtgactaatatatctccctcttccagatcagcatcttccatatttaagatgacacgtgctcgcccctctataactccggaggaaacaggcagacctgcaatcgcaccggcgggaagattttctcgtttgtacttgcctgtaatgatttcaccatcagacgtgataacacgcggcggggatagtttttcatataatttgtactcgttttttcgtttgctgatgatttgataatccagtttatttgcgcgtacggcttcatgaagttcttcaaaagtgagatagtatatgtcttctttttcatgaataacgcccgcttccacgagttgttcggcttctttcagtaaagcctgcttataaacgaagtagcgactgaccatgccgtatttcggatattccctaaacccgctgaaattccggatgatgctgatcattcgttttgtttctttggctttttgttcaccatccggtaattgcttcaatcgatctaataactcttgttctttcttcaaagcttcctgtcgcccttgctcaaatttccgatggttggcattaggcacactgttattgatattatttagaatcattgggataagtgcaaccggtttttcgctccatcgagttcttgtaatatcaatttctccgacgcaccgcattccgtatttgttgagataatcatcaatagcgtccctggtttcctgcccgccctcaaacttaaccagctcatccataaagtgatcatcttttacctgttgtaaataatcaatgacttctggataaggacgtatcacatctgccacatccaataatgccaaacccatttccgaagtaatattgctcggtacagattgagaaagcatatctgctgcgtttttttcacctaaccactcgttcattttttcgttaatccatgatgaagcattcatggcagctcgaattacagccgaactttttgggtcaaataaaatcttctttaattgctgcccgatatcttccagaataaattcaaacaaatccgctccagatttcgttgtgatattttgttttaactcttcgatcgatgtttggcttcttttgatcaaatccgtaactattgtcggatcgttttcaacttgagccagcatatctgtattgcctttgaagggattcggtgctgttttatcaggtatcgacttaatgaaatcccgtcgctctattatggtcataagtgcgtcttttaagagcggatcgtgctgtcccatgccatttaataatccttctctgctgtcaggtgatgccagatgatgtgtgacatcaacaaataatcttccgccagctttatgcatgggtgcagaagtagtcagcagccaaaaagacaatccaagcggttttatgggatctgtcatcatttgttgatgaccgacagaaatatagacgtgattttcttgatcgctcgcttcaggaacggggtataacgttgtgatcggacggctctggacaatataaaaagtatcgcggaccaaacaccattcgatatcttgcggctggccaaaataagcttcgatctgtcttcctatgcgtgacagctgtaaaatttgttcatcagtcagtgtttgagtcttttgctgatcaggattgatttgctgtgtttctgttccgccttcttttcgtccattgatagccaattttttggtttctattctcttatcgacgatttgcccgtcccgtactttataacaatcggcagagaccaacccagagaccaatgcttcaccaagtccaaaaccggcatcgatggataacacctttcggttggaggtaatcggatcagcggtaaataaaatccccgaagcctgagggaacaccatcctttgaatgataactgataaataaacttggctgtggccgaatccattttgcatccgatagatcaccgcgcgatctgtaaatagggaagcccagcatttgctgatatgctgcaagattgcatcgacgccgataatatttaaataggtgtcttgttgaccggcaaaagaggcatgtggtaaatcttcagcagtcgcactagaacgtacggcatatgcatgttcctcgccaaaccgggagagatagtgagaaactgcctcaacgacatcggaaggaatttctgcttccataatgatttgccgaatttttctgctgattttaccaatttgatctcgatcctcaactttcagcatggtcaattgattcaacaacgattgtaacgtttcgttttgttcgatggcttttcgatatcctgctgttgtgacacaaaatccttctgggacttgtataccttgaatttttgataattctcctaaatgtaacccttttcccccaacgagcaaacgctgtgttttttccatttcatgtaaaccaagtaccaaagaactcattctgcatcttcccttcaaaaaaaattgacaagagcttcctagcatgatataattataatataagatggacatatataactatttatcaagaaagcgcacgtagactgattatatcaccgtgtctgtttttgcgcaatataaaaagaacctggcctaattggccaggttctttcttagtttcccgctatatcccaaagcgatctcatccagggaaagaacgcgaaaaggtttacaaaaatatcataccttccgatttcatcgtacgtttagactgataccacatcagaatttgaatcagaacctaaaaggattttccgctaatagtcagtacatttgcagttacattagcactgccattgctttgatatccttctaccgtaagcgcggtttcatacatcttacccattggcatccctaagctttcccacttcttgaaatgttcgctgacagatacggttccgctcgttcgttttgtctgccggacactccaatactgtttaaaggtggcgatacctataatggaaggttggttgattcgagtggtttcataaatgtcatatgtgcccccgtcaacagtaaaagttcccttcggcgttccagtcggtctgtaggtgccccaattatcgacgatataatattctgtgagcggatctttcgtccatccataaacacacagataggaattccccccgggattgaaggttgcgttgtaattgattgatatgtttccaagttgtgagtgagtcttcgttgaatcgaatttcttgccttttcggaataaagcattcccaatgttactccactgggcactgaacgcaccgccgctattaagcgtcatactggtattcccagagtccttccacaattcatagtcatagccatcttgtgtgccagtctgatttgaggtgattgtagttgccgcctgtgcggaccatgcaggtaatgtcagcgccagactaaataaaactgctaataaaaacttcattcttttttgtttcatttggcattcctcccgtttgatcagattgtattcaggtcttaccgtcatgttttgtttatcctcaccacctttcaaaagaaggcagccagatcggttaatgtataggaaatagagttgcattcaatgattttttgaagccgctttcaatcttattaacaccaacttatctgtgttgcagctgtaggtatgtcagaaaagttttcacagcccattacgaaccacacttatcattagttttttcgaaagctctgcaaagctgtattgagatcctttgtgtgagtataaattttcttatacaaatcgaatagtgttttatatttttgaacattttgttctttcggataaaatgcagctgcctcacgaatgaattgctctgcacattcttcaagggattcaaaccacccgcttccaaaggcacccagcatagcagcccccatggctggaccttgttcactttctaacttaatcacccgcgcattgaaaatatctgcttgcatttgaagccacgtttcatttttagctcccccgccgatagaaacaacagtatcaactgattttcccgcttcacggaacagctcaattgattcatgtaaagagaatgtgatgccttccattactgccctcaaaaaatgctctcttgtatgggctccatccattccaatcaagcttccccgaatggatgaatcagcatgcggcgttctctcaccaaccaaataaggagtgtacagcagtccatttgctcctatcggaatagattccaccccctgcagtaattgctcaaacgattcgtttggtgcaaacgttcttttaaaccagtccaagctgtatcctgcagcgagcgtgactcccatcgtataaaaagaatctttttttccatgattaaaaaagtgcactttccctctaaagtctcttcctttgtcttcttcacaggaaagtatgacccctgacgtcccaatactgcataatgtttttccgggagaaaggataccggctccaacagcaccgcaagcattatctgctcccccagcgtacacttttgttttatccgacagcccggtctccgctgcaacgttcggaagcagtgatcccacacaatcatgggattcaacgagcgggggacaaatatccgctgaaataccaaattgtttgcaaatctcatcactccactccttgcgggtaatatgtaaaagcaaagttcctgccgcatcggagtattcggtgtgaatgactccagtcatgcggaatctcacatagtctttcggaagcaaaaaaacagcagcttttttaaagagttcaggctcatgttccttcacccataagattttaggtaatgtaaacccttccagaacacggttctttgtgatgtcaagcagtcgatcaccaaatttctccgtcattctgatacattgaggcgtcgttctggtatcattccaaagaatcgcatgacgcaacacctgccgatcttggtcaagcaggactaacccatgcatttgtcctgaatagcttatcccgtcaatatcttcggcttgaacgttggatattgaaaccaattcagccaatgcattaattgtttgctgcacccagtcttcaggattttgctcactatatcccgccttctcttggatgagcggataacttttggacgtttccgcacaaaccttgccgttttgattaactaaaatggttttaacagcactcgttccaaggtctattccaatgacatacttcatttttttactccttcccctctaaataaatccccaattatagaaattacccgtcataacacaactataaaggaatcatgacgggcagttcaggggtggctcagctatccctgctataacttttcagcgggatctggagcttctttttcatttgttatacttctaaaatgtattggttcaatatcgcttttaatcgctcctgtcttcctgattcgtttttaattggtttattattcagcgcatattgctcaagtgtcttgaaattagctcttccttctgcaatttcaaggccaatcccttcagaaaagctgcggtaacggtgttgaatcacatcttcaaacacacggtcttcgattaatttgtgggcgactttcaatcctcttgcaaatgcatccatccctgcaacatgggcatataatagatcatcaggctcaaaagaagatcttctgaccttcgcgtcaaagtttaatccgccgcttccaaggccgccattttgcagaatttcgtacattgccaatgtcgcagaatataaatctgtcggaaattcatccgtgtcccagcctaaaagaggatcaccctgatttgcgtcaacagagccaagaagaccatgcactctggccatgcgtaactcatgttcgaatgtatgtccggctaatgtggcatgattggcttcaagatttaatttaaaatgattgtccaggccatattgcttcaaaaaggcaatggttgtagctgcatctgtatcatattgatgagcggtcggctcttttggtttcggttcaatcaaaaactgcccggtatacccgatttccttcgcgtaatccactgccatatgcatgaatctggccaaattatcaagctcaaatttcaaatcggtgtttagcaatgtttcgtatccttcacggccgccccaaaatacatagttctcggcgccaagctcttttgccgtttctaaccctttttttacttgtgctgcagcatatgcaaatacgtctgcattgcaagaagtcgcggcgccatggacgaaacgcggattcgtaaacatgtttgcagtattccataatagcttaacgccgctgtttctcatgtactcttttatcatgctcacgataatatctaaattttgatttgtctcttttaacgtactgccttccggtgcaatatcccggtcatgaaaagcaaaaaaaggcgcatccagtttttcaaacatttcaaatgccgcttctactctcgccctcgcgagatccatacctttatagtgatcccacggcctttgcatcgtagctgctccaaaaatgtctgtgccgtcagcagtaaaggtatgccaataagcaatagaaaatcgcaaatgttctttcatcgtttttccgccgattacttcttgaggattataatatttaaatgctaaaggattagtcgaatctttcccttcgtaaatcactttgtttacgctttcaaaatagttgactgaaccagaatgagagtgagccatgtggtttcccccttaaaaataaattcaaaacatgataattcaaattcaggcgcattttatgacatactgtaagtacggcttatgttagtttgttgctcaaacaaactaacatatttttatcttatataacctcgtcagtattttcaatatttttttagttttttatggatacattagatataataaagattagattcagtatgtactatgtttctcactacaataaaatttcaacttaatttaaagattatacaaatggagtggattaagtggatatcgctgatcaaacctttgtcaaaaaagtaaaccaaaagttattattaaaagaaatacttaagaattcacctatttcaagagcaaaattatccgaaatgaccggattaaataaatcaactgtttcatcacaggtaaacacattaatgaaagaaaatcttgtatttgaaataggtcagggacaatcaagcggcggaagaagacctgtcatgcttgtttttaataaaaaagcaggatactccgtaggaatagatgttggtgtggattatattaatggcattttaacagaccttgaagggacgatcgttcttgatcagcaccatcatttggaatgcagttctccagaaataacaaaagacattttaattgatatgattcatcactttattgccaatatgccgcaatctccgtacgggcttatcggtataggcatatgcgtgcccggactcattgataaaaatcaaaaaattgttttcactccaaactccaattggagagatattgacttaaagtctttcatacaagagaagttcaatgtgcccgtttttattgaaaatgaggcaaatgccggtgcatatggtgaaaaagtatttggcgccgcaaaaaatcacgataacatgatttatgcaagtatcagtacaggaatagggatcggtgttattatcaacaatcatttatatagaggggttggcggattctccggtgaaatgggacatatgacaatagactttaatggtcctaaatgcagctgcgggaaccgaggctgctgggaattgtacgcttcagagaaggctttattaaaatctcttcagactaaagggaaaaaagtgtcctgccaagatatcatagatctcgcccatctgaatgatattgaaactttacatgcattacagaattttggattctatttaggaataggcctgaccaatattctgaatacattcaatccgcaagcgatcattttaagaaacagcatcattgaatcgcaccctatggttttaaattcaatcagaagtgaagtgtcgtccaggatttattctcaattaggcaataactatgaattattaccatccctcttaggaaaaaatgcaccggctttaggaatgtcctctattgtgattgatcattttcttgatatggttaatcattaattaaaatgtttgaatctctatgttttacgctcatcttttaagatgagtttttttgttttttaaactgagcaggagaatttatgaagggatttttcacataggtcattttctaatatgaaaaaggagttctgaaatagaagcctcctttttcaaaagcgcattatttttctttatagcgaaaatatttgaagtcggccggaatatgattaccgctggtatcttggcattgcatccctacaaaggctcccgtgaagaatcctcctccacggatgtaatcatctgataattttttcgattccaatgcaatgtcaattttgtgccagtcttctttgttcaatgaatagaaataattgtatttttccttttcaattatcgcttttaaatatacatatttgacttccggaggaataacaattttattttttaatggttgtgaaaaagaaaagttatcacatattgttaattcaagaatacggccaagttcttcatcatgcgtgacttgaagagccgtccagttctctgtattgtaatagttcaccaaaccagcggcttgctgaaaattttcaggataaaactcaacagcagtttccgcttcaaaatggaaactttgccaccgtctggctacaaatgcctgagtaaatgtcgaggttaatgattcatgaccgtataatcgtaaatgatttggcacttgagtcaatgaacctaattcattcgtgaatggaatccttaacgtttgaaaatttatatttaattttgaatcctcaaattcatcgacttccgggtacgttgcttcaaacatggtttcgggtatagaaggtgcttctgcctccaagcttccttcttttccgcctgctacatagggccattcatctttccagtaaagtttttgaatagctgtttctctgcccaaaggacaatatcctctctgctgaaaaatggaatcatcatcaggatgaatagggcgtcccgttaaatgagctaaataccactcacctgtatgtgtttgaacaatggatgcatgaccgcacttttgcagcggatttcccggatcatgccatgacgttaaaattggattatcgggatgaacttcatatgggccctcaatatttgcagagcgggcaattgtagcagcatgttcgaaccgtgttcccccttctgcggttaataaataataatagttcccgatatgataaaggtgcggagcttctgtcagttttctatcagtgcctttaaatatcactttcggttttccaattaatttttgctcctcatcagaatattcctgcatgacaatgcctccgaatgagtgccgatcaatacgctgatcccataacatatttaataaatattttttcccatccgtatcgtggaacaaagacgcatcaaaccccgagctatttaatctaatcggctccccccaatcaccattaatggtttcacaagtaactaaatagttgtgacaatctttccatgcgccctctactaccttaacatccgtatagatgagccaaaactttccgtcgctgtaacttaaacatggtgcccagaccccgcctgaatcagggtttcctttcatgtctaattgtgaaactctctgtaatggatgggcaactaagtgccaattcactaaatcttttgagtggtgtatctggactcccggaaaccactcaaatgtagatacagcaatataataatcttcaccaaccctgcaaatactcggatccggattaaatcctttaagtactggattgataatcttcatttggactccccctcagctgttttctgttgattcatcatgttttaagctttgaaatcatcaatatgatccaaataaactttgtctctattctctaattcccgtaccatgtttttatattttttctcatctaagttatagaaattaatatcaatcatagctaaaaccagtaagaacacgggaataatggttgttgtaattaaaattccagtcaatgcctccgccgtttgcacctgatttgccacatatccaaacttatctaaaaccagccccggtacaacgcctcccaaggccatgccgaatttaaagaaaaatccgataatagcgtatatgagcccccccattcttttccctgttctgtactctccatattctattgtttcaggaatcagcgcccacatatatcccccggcagtgagacttccggcagcggcaattaatcgaaagaagagtataagaaacacattgcttggcggaacaaacagtaaagccaagaggccgatcatattcagtaataatgcatagtttagtaatttcttcttccccaataattgatgaagcttaggtataaacggtaaaatgaccaaagcaggcaaacttccgatcaaaccgtaccacttcactaaatcctctctttctaagttatacgttacataatagatgccaactgaattactgattgaattcactccaaaaattataataaagaaaatacttaatacaacaagcggacgattaacacgaaattgctcaaatatatccgttaatttaattttttcttcagttttttgaagagtgacacgctcttttgtgcttttaaaacaaaagattaaaaggcacccgcctattattcccataatacccatggtcagctgccagccaagggattcgttacccgaagtatcgcttaaataagcagccagtaaaggaacaaaaaatgcaacaacaagtccgccaagattcgcaaataacatacggacagaggttatactaacaacttcttgattatttctggtcattgcggaagttaacgcgccatatggaacgtttatcgttgtgtatgtaagcgacaagccgacataggttatataggcatatattaatttccccatatccgaaaagtccggagttgtaaaacagagtattgccaggatgacaaatggaaatgccccgaataaaagatatggtctaaagcgtccaaacctgctatttgttctgtctactattgttccaataaaaggatcagcgagagcgtcgatgattctgaccactaaaaacatagtaccggctgttgctgctgataaaccaaatatatctgtatagaagaacaaaaggtaagtagatactgttgcataaatcaaattacatgcaaaatctccagacgcatatccaactttttcaaccatgctaatcttctttacattttcactgagcatgatttcctctccttttcggccctttaatatggaacagtgagaaatggaacacttctttaaaaacaccagacagtaagcgctttcaacaaaacgatagagattacctttcacagagcattttcacctgcaaatgatgatcggcaagcagtacattcatgatattcctgaaaaaggataaaagcctttttcattttgcctccagctaaatcgtgcctcttatcccccttccatccatgtttaaaagatccttatctcatggacgattaaagtgagttttgttagtttgttgcatgaacaaactaacttgatttaatattataaaatcctttcggctttttcaatgtttttttcagaaaatttaaatctggctgaaataaaatgattcctccccctactccccgtatttcggaggaaacaccaaagctttttgggaaagtttgcggtcccccaatgattattatcttcatgaaatgcatctgtaacagcggtttgtccaaatgagataagtttgaatgagactgaaaacaattaaaaacaccgatagaatgaaactattggtgtttggagacatgtttttttatgttgcagcgtttataatgattcactcttaataacgagataatatgtgaaaatcacatgtcccttaaaaagttagcggcagttcttcgagtgctcgcatcagaaaattccctttccattttatttgttcctttccgccttttatctgtatatttggacagcggcgtaataaggtggaaatagcaatctttgattctaagcgggcaagctgagcaccaaggcaaaaatggatgccatggccaaaagcaatatggcggttattctttctttcaatatcaaacatgtcggcatttggaaatatcttttcatcgcggtttgctgatgctaaggaaatgatgatcacatctttccgcttaatttcctgcccatgcagtataaacggttcagccgtccagcgaatcgtcgttaactcaaccgggctgtgaaaccgcaatgcttcttctatggctgagttcatcaaatccggctgccggcggagcttttccagttgatcatggtgacacatcaaagcatatgtcatattggtgattaagtttacggttgtttcatgacctgcaacgataagcagcataatcatcgagtacaattcttctgtacttaatggtgtgccttcactttccgcctgaattaatgcactgattaaatctcctgcaggctcgctcctttttttacgaactaagtattccagatattcaacaaattcccctaacaaatggtcattctcctgaagtctttcaggggcatctgaaaaatcaataattgcttgcgaccaaattttgaaattttgacgatcttccaggggaataccaagcatttcacttatgacgataatcggcaaagggaacgcataatcgtccactaggttcatgaatttgctgggctgtactttatccaataaagaatctgctatatgttggattttgtcttccagctgtaaaatcatccgatgagtaaatgctttctgaacaagagttcgcaagcgattgtgatcaggggggtctgaattaagcatatgctttcttaaaggcccttcattcttaaatagaacaggtcgtttctcttcttttgcggtaaatacattttcatagtttttctttaatttttcattctttaataactgtattgcatcatcatatctcgatataagccagccttccccaagacttcctaaagataatgggcagagagggcgggattttcgcagttctttataaaaagcatacgcttcatctttaaatgctctggaagacaattgactttccgtcaaaaccgttaaactctcgttttgttttgaaaacattgattcaacctccatctctatgaaaggttatgataatctttaaataaaatttctcaaagaacgatcagcagcccgttagctaaccctgattaaaaatgatctgttaccacactgttacgttagaacttccactactttgatatccctctgtcgctaagacttggtaagaccaattactgcccagattcattccatgactcttccatgcgttaacatgattgctgaaagtgattgcagcgttgattccagttggtctcttcgtctgacggacgctccagtactgcgtaaaagtagtgttatcgccatcaatggaaggtgcattataacgtgtcgttgtatagatgtcatatgtacctccatcactgtttacagtacctttatacgttccggtaggtctgtaagtaccccatgaatccactacataatattcgatgagaggtgatctcgtccaaccatataaagtcaaatatccattgccattaggcgcccaaacaccggcattatagtttattgtcctaaatggcgaacctgtagtccaacctttaccaacaacgaaatttccggtattagaccaattaacactgtaatttcctccagatccattgacagcgtttactgttccgcccccatcagtccaattttgccagtagtctgtgccagctgcagaagcgcttgctgaaaacaaactaatactcattaatgctgccgttaatccaactaagaaattctttttaaacttaaacatatgttacctcctataaatttttctggctttgacatgaggttgcccttacgccaaagcttttgatcgttcccttcaatataatagcacgaatcaacgagtgaatattatgaatatttgtaatttaattacaaaggcctaaaaaattatattataggtgtcttgtttccccatggccttacttttttcgtgaaatcacaattcttgtttctaaatctgagaatatatgactctctaattatagaagctatgattgaagaaaccgggcttgcaaattcttatgtagaagaatcgttccttgaagatgaattgacaaacgcacttgataaatcaggcgattatgcaagagcagtgcaatgaaaggaatgaagatcgccctatacctgtcaaggttcggccaccggtcaaaaacaaggcaaaaaaagtataaatcaaaattttcatttcaacattttttacaaattaacggggcgccgatgtacaggaaaatgaaaaaaacacccgatgaaacggcgggggacttataaccttaatttatttataaagaataaaaagaaacctttctataacgctaataaactccatgcaaaattcttcactaagtattattttgtgatgactattttcaagaacatattttaactcttggattgcatgtctaacttttttggggtttttcgatttctctatatctcccccacagtggacaatacaatttctaatatggttggcattaataatgaagtgccattctttaatatcatcaggaaaaacttctttcttaatcttttttatatataaagctgctctggtaataccgttaccctgtaaatcttctagcttaatacttgtctcatccggctgaccgcataagtctataatcttttcctctaaaaaagaatacacgctaatgaataatgaatttctcataatggaaggaaagacatctctaaaattgactatttcatcataatgccagtcaacaaattcttctttttcttcatcactgaattccttcatagactcttcaaaatcataaatctccctgccgagactttgctcaatgtatccagcatactccctaaacatctctaacttcccagcaaccaaaaaatgaaatgacaaatttttaatattattcataatcaattactcctttttttgaccaattatagcctttcaggtatcaaaagtaatctgattatgatgacaaagcacctcaagaatacttaagtcggtatgctcttgaatatcgtttatgatgtctctaagctctactaacctttgagacttgtttaaacatccctgttaaggcacggacagcacaatgatagttactttctctaagcttctgttttcgaagggatttccactctgtcaaatggtaataggaatagagcttgttgttctccctgttgtatctcaaatttttgtggtactgcttgtcggtatcccccttgtgcttctctcacaataacgctccgcccaatccacatagctgcggcaatcaggcgcgctacatcttttaggcggcagtacaatcccctctatatattctttctaaactgcccctacgatcaagcggttaaccgctaatcgtttccccccgctgaatggatgacatcgcaaaagaacataaagtgaattattctaagttacttcaaaagccattaaagaacatctaggcattcataaaaatccaaggttataaagatttttgcattaaacaaaaccattgaaataaacaatgacaagtgatacggataatgatataaattgagcagcccacgggttgctcttttttatcaactccttgtgctaatcgcttaataagaattgcgccttacacatactccgagaggaagccaagtacagtaagatcgcagtaaaacgaaattacttccccgttatggccgtcgcagactagctgctatccaggctcagaatgttcctctcgttcggcttcattcctcaacacctttgttccgtatccggatacgccattgataagggttagacgcgtcacccttgttttgttgataggttaagtttatcgacatttcaaacataaatagtcccccaattttgtcgggattttgttgaaaaaaaacgccctgctaaaaaaaacagagcgcaaaaagctattttattaacgtgttactgtaaactcagacgtaaaccagtctccataccaagtgtcataatcaccatacttgtaagctttaaagagaactttaaatttcccacttttcccttttcctaaaaagtcactaattaatatctgtctatcaatattaccattggcatcaatggtacctcttctttctgcgagtaactcatgtttgttaacatcattaatcattagttgataggagagtttcttagaatactgggtttgaatgtttattccgatataagtatcagttgaaggataattacctgaacgatctgttgtaattttagcttttactccattatgtgtctcccacccggaagttgctgcaaaagcctgtccaggtttaaaaattcctaaaccacctaaagtcaaagcaaaaacagcgaaaatcatcaaaactttcttcatgcttctcatctcctttttttatttacacttttattaaaccaattttttctaacaataaccatatttttcttgtcattttagtgaatttttcgtcaattaatcccaagtgctgtggcaatatgaggatagcacgctgtttttttcataataggtatccttcttcatgccaagttccatataaatatgaatgtctttcacctttaccagctgtcaggtacttcttctcgataatcaaacgttcctcatcatccaagatgttttttaaagcacattccatctgcttcacctttagttcattaacggtaagcgaatctcggagggaagggaaaatgttaatatcggtagatgaacactctttttattttctaagtggactttgagcgcgcgataatttttcaattatttgataactattttacggacagccttttcgtccacatattcctttgacatctcttctctccattcattcatttttcttgttcctatttatggatacctcttcctgaattttcatccaaattaatagggaatcaatgatgaacagctgcatcaatgaaatatgtacaagaacgactgggccataagagtattcaagtgacgtcaaatatttactcacatcatcaaaaaaattgacagagattcaatgaataagtacgaggattatatctccacaattatgaagtaattttttattgattttttgtgggtgttttgtgggtgttttgtgggtgatacatgatttatattaagttattaaacttgttaataaaccaaaaaatcccctgacaccaagagtgccaagggattgagagattaatattgagacatgtattgttcgcgctcccacggatgaacctgtgtgcggaacatatcccattcgatttcttttgcttcgatgaagtgttcgaacaggtgctcgccgagagctgcaaccataacttcgtttgatttgaattcatcgagagcttccgccagtgtcgccggaagatctacgattccgttttccatgcgctcttctttgctcataacgtagatgttgcggtcaatcggagccggcgcttcaagtttgtttttgattccgtcaagacctgctgcaagcaatacgcttaacgccaagtacgggtttgccgccgggtctacgctgcggacttcaacacgcgtgctgatgccgcgggaagccgggatacggatcagcgggcttctgttttgcgcgctccatgccacgtaacaaggtgcttcatagcccggaacaaggcgtttgtaagagttcactgtcgggtttgtgacagctgtaaagcttgtcgcgtgttttacaataccggcaatgaagtgttttgctgtttcactcagctgaagatcagcgtctttatcaaagaatgcgttaacgccctctttaaagagtgatagattacagtgcataccggatccgtttacgccgaacagcggttttggcatgaatgtcgcatgcagaccgtgtttgcgggcaatcgttttgacaaccagtttgaaagtttggatgtcgtcacaagaacggatggcaccggcatatttaaaatcgatttcgtgctgacccggagcaacttcatggtgagatgcttcgatttcaaagcccatttcttcaagttcaagcacgatatcgcggcggcagttttctcccaagtcggtcggagcgaggtcgaagtatccgcctttatcattcaattcaagcgtcggttcgcctttttcgtctaatttaaacaggaagaattcaggctcaggtccaagattgaaatcgctgaatccgagttctttcatttctttcagaatccgtttgaggttgttacgcggatcaccttcgaacggcgtgccgtccggattatagatatcacagatgaagcgtgctactttacctttttcagccgtccacgggaagatgacaaatgtgttcagatcaggatataagtacatatcagactcttcgatgcggacaaatccttcgatggaagaaccgtcaaacatacatttattatcaagtgctttttcaagctggctcacaggaatttctacgtttttaatcgttccgagaatgtctgtgaactgaaggcggatatactttacgttttcctcatttactaattttacgatgtcttctcttgtgtactttgccatttcgtaaaactcctcctctaaaaggtaaatgtatatagcaaaacagttgctaacggattaatgaaagaatcgggacatgtcaccttggcggaaagtattcccccgctggaaacggcctgcctgcatcagttcgtttttcaaaagctttctgagttcatcatcagacagatcatgcttcatcggtttggccgttttggatttttcttccggttcggcagatgccttatccagaatttgtttgataccagccatattgacgccttgttcaatcaaatttttgatttctaacagtttatctacatcatggaatgaaaataatcgtctattcccttcgcttctcgctggaaatatcagtccattttcctcataatatcgaatttgccgggcagacagttctgttaactgcatgacaatcccaatcggaaataaaggcattgagcggcgaatattatcactcatctcaatttcccccttttcttatcttagtctcattataggtgatgttatattttgtgtcaacacaatgtaaggaaacttaacatcaaattctttgaaaattgcaaacggattagatcagccctttttccattaacgcatttacggcgctgcaaatcgcatttttcacgtgcgcataggttaatcctccttggacataagcaacgtaaggcggtctgatagggccatctgctgataattcaatgcttgccccctgtacgaaagtgcccgctgccatgatgacatcgtcttcatatcccggcatatagctcggatacggcgtcacatgcgcattaatcggagaagcatattgtatcgcctggcaaaaagcgatcatcttatcagggtcctgaaactcaactgattggatcagatccgttctcggcgtattccaggccgggtttgacgtaaagcccagcttttcgagaaaacgggcggtaaataccgctcccttcaagctttgcgccactacatgcggagcaagaaagaaaccttgatacatttcctgcaatgaataaagcgaggcgccggcttcacttccgattcccggtgaggtcatccggtaagagcaggcttcaatccacttggcttttcctacaagatagccgcccgtcttggcaaggccgccgcccgggtttttaattaaggagccggccataagatccgcaccgacgtggcaaggttcccgctcttccgcaaattctccgtagcaattgtccacaaaaacaatgacatcttctttgatttcctttacgaaacgaatcatttcttcaatttcatttattctgaaggacggacgattcgcatatccttttgaacgctgaataccgatcactttcgtattcggacggattgcagcccggaccgcttcgaagtcaaccttgccttctgaggttaaatcgactgcattatacccgatttgaaattccttaagcgagcctgagtactccccgcctctcaccccgacgatttcttcaagtgtatcgtaaggcttgcctgttatataaagcaattcgtctccgggtctcagcacaccgaacagcgcgattgaaatcgcgtgcgtcccggaaatgatttgcggcctcaccagcccagcctctcctccgaacacatcagcatagatctcttccagtgtatctcggccgatgtcatcatagccgtacccggttgaaggcgtaaaatgcgtatcgcttactttatgctttctgtagctttgcaaaactctccattcattccgttcactgatctcttctatttttttatgaacggcggcgatttccgcttctgtttcttcggcggttttttgtaaaagagcgccgtgtgtcagtgtctcaaacatgttgtgtataccttccttacatgaatttcttcagttctccaagtatgctttgttcttcttgtacgtaccccgagacttcgtatcgctcattttcttcattaaaataaaggccgtcgatcatagtctctgatttgatgcgtgacatcaatttgccttcagccgcaggcacatgaacttcatacgccgtcatcagctcccggcgtaaataagcttcgatttccgcttttagtttcgcttcatccccggcgattctagcgctgatcataatgtggccttcccctgctgtcggaatgaagtcaggaaatgtttcatcccgtttgttataagcggtcaacaccggaatatcatctgcctcaagctcttttaacaggccgagaacagtctgttcatgcccggcataatcttcattggaagaatcaatgacatgaatgatcaagtccgcttccttcacttcctcaagcgttgaacggaaagcggcaatcagcgtggtcgggagatcttgaataaagccgaccgtatcagacagcaggacgctgtagccgctcgggagcgccatctttctcgtcatcggatcaagtgttgcaaacagcagatcttcttcatagctgtctgagcttgttaatttattaaaccacgttgatttcccggcattggtatacccgacaagcgccgcctgaagcacgccatttttcttgcgtctctcccggtaacggcttctgtggcggataaccgttgacagctgtacgttaatttcgtgtatgcggtttctaatgtggcgccggtctgtttcaagctttgtctcaccgggccctctcgtcccgattccgccgccttgtctggagagattgattccttgtccgctcagacgcggcagtgcgtattgtagctgggctaattcgatctgaagctttccttccctcgtcttcgccctttttgcgaaaatatccaaaataagctgcgtgcggtcgatgattttcgcttcaattgccgtggcgagtgatttaagctgactcggtgacagttcatcattaaaaatgaccagatccgcttcaagctcttcacacagcgccttcagctcgtctactttccccttgcctatatatgtagcggcatccgctctgttccgtttttgcgtaatccgggtcagcaccgttccgtcagccgtttttgtcaatgaagcaagctcgtccatcgaatggtcaaagtgctcgtcggtcacgtgcggaagctggcagccgaccagaatgaccgtttcttttttttcttcctgttcgttcaaatggatgttcctttctgtgtcgtattgggcagtagtactatcataccaaacccgcagggcgtataccacacatccggcgggttttaaagagagaaataaaaaagaggcctctcagaccggctgagaggattattcatgagctgccgtctcatcttttataaataaatcctggctcttgatcgtcatcagatcgttttttaagtattggtctcccattaaaagcctcatggcctgagcgcggattgatttttcaatcacatttctgacaaagcgaccgttgctgaatttaatggggcttgtcgtgctttttactgtcattaagtaatcttttaacttccattcggcttcctgacttaattgatactcccgttctgctatcatgcgcttggcaatgtccatcagctgagtgacagagtaatccggaaaatcaatgctgataggaaaacgcgattgcaggccggggtttaatgaaaggaaatgtgtcatttctctcgagtatcctgccagaatcaggataaattcatgttgtttgtcttccatatgcttgacaagcgtatcgatcgcctctttaccgaaatccttttctccgccccttgcaagtgagtacgcctcatcaatgaataaaatgccgccgagcgactttttaatcagatctctcgttttttgcgccgtgtgtccgatgtattcaccgaccagatcagcacgttctgcttcgatcagatgtccttttgaaagaacgttcatttcgaagaaaagcttgccgatcagtctcgcgacggttgttttcccggtgccgggattccctttgaacatcatatgaagagcttgtttcccgactttcagcccttgttcggcccgtttttgattgacgaagatccatgcgtaaatttctttaatgttgcgtttcatctcttccattcccactaatgtgttcatttctttttcaatttctttcaggatgctgtgcttggcttcatttttttgcagggcggcctggtattccgcctcagcttccgcatttgtcagcacttgcttttggccattaagaatgatgttaatttgtccgttatttttataggttacagcgcgctccaacatgctcacctctctgttctctctttatcttattcatgatgaagacgttctgtgacatccgcctacatcatgaggcccgttttctcctatatctgtcacattttccgttctcttcgggaatgatgctgaatcctgcgctttcccgagaaatatttttcatttcttattgtattcagctgaaacggggggacaaaccatttatttttattttccgggaaatgttaggcggatttcttatttttctcatgaatgacagccgtacaagcaccttttgaatctcatcatatgctgtaatgaggtgatggagaatggttaaaatttttatagaccctggtcatggcggaactgattcaggtgcaaccgggaacggcctccaggaaaaagcggtcactctggagatcgcgctggctttgcgcacaattctgacggatgagtatgtaggggtttctgtcatgatgagcaggacaagcgataagacggtcagcctgacggaaagaacagatgccgccaacagctggggcgcagattattttttatccattcatattaactcaggaggcggaaccggatttgaaagctatatttacccgggagtcggagcgccgacctcgacttaccaatcagccgtccacacacaagtgatccacgcatcaggttttcatgaccgcggaaaaaaaacagacaacttccatgtgctgcgggagtcaaatatgccggcgattttgacggagaatggttttattgatacgacagctgacgcaaacaacctgaaaacatccagttttattgaaagccttgcaagaggacatgccaagggcttggagcaagctttcagtctaaaaaaaaggctgacttatataaagtgcaaatcggcgctttcaaagtgaaagcaaatgctgatgcgcttgccgccaatgcggtgtctaaaggttttgatgcaatagtgctttcaacaggcggcttatttaaagtgcagattggcgcattctcttccagagataatgctgaatcgttagcagagcgggcaaaaaaagcgggatttgataccgtcattacactaaactaacgaaaaacccctgttctcccttttttaggaggaacaggggtttttctgttattgaagaatatcggcgacaaactgtgaccaagtttcaagacgctgatacacgtcttgttcttttaattcgctcactttcatccagcggccggcgatctgatctttttctttcacttcgacttgcgctccagacgctaattggagcgcagaaaggatgccgatatgtaccttccctacattgttttcatcatcgttgattaaaccgagtgtgacaatgttttgtttgtcctcctcacgaatgtacagttcttccgccagctcccggtcggtattctctttcagcacctctgaaaaagaagccgccccttccataggattcatgtgtccgccgaaaccgagggaaagcttattatggaggcgcgattccccgccgcccgcgagccgttcatacacaaacacctcatcatcacggcggatgacgacatatggaatcggctgtttaaaacgcgggtcctcttccgcgtcgcctcttctgatgtcaaaaaaatgctcctcaatttgagccatgatctttacgatacattcatcttcgctgttgactccctgaaatgccagcgtttcattttgaaagacgtcgcttcgcggtgcagccaagatgatttcatccattttattcatgtccgttcctcctgtcttacctctccattcaagccaaaagagcagatattatatctgctcttcatcttggccgaaataaaaatcttcgtctttaatcggttctaccgtcgcttttttgtagccgttccctttcatggagaagaaatcatgtgatttcgttttggtgtttaatccgtttaatacgatcggattaatatcctcttcttcaaagtaaggatcgaatcctaagttcatcaacgctttattggcgttatagcggataaatttctttacgtcatgagacagcccgacttggtcgtacagatcctcggtatactcaagctcattatgataaagctcttctaaaagctcaatcgcaaattcgcggagttccgcttttttcgcttctgtttgtttattgtatatttcttgagcaagcagtccgacatagacaccgtggatcgcttcatcacgaagaatcaggttgatgatttcaccgctttgcatcagtttgccctgtccgtagaaatataacggataatagaaaccgctgtagaaaaggaagctttctaagtaaacggaagcgaccatcgctttaaacagcgaaatctcatcatctttttttatggcgcggtacagtccgacgacggtgtgggcttttttctgcaggtatttattctgcttcacccattcaaacacttcgttgatcgtttcagtcggagcaagcgtcataaaaatatttgaatatgattttgcgtgcaccgcgttttccatcatcgccatgaaattaagaaccgcttttcgctgatggccttctacgtgctcggccacaatcggcatgcccgtgttcccctgctctgtatcaagcagtgtcaggccggcgagaaccttcatgtacgtatcctgttcatttttacccaaatacttccaagtgagaagatcgccgtttaatgcgatctcttccggaagccaaaactgctttacgttttggttgtaaaacatttgggtgaaatcatcttcatgctttgaccagtttgctgcgtcataaatttttgtcactgtaaactctcctttaatcaaacaacacaagaaagacagctgtcctgcccggtatctttcgttcttgcatagtaaatggttttgatgcctctatggtgggcatacagatcaatacggttcagatcacgagttgtcatcgtatctttcaaaaacagggtgaagctgattccctgatcgatatgctgctggattgtcgcgatcatatccaccactttgaacatgtccatatcataagcttctttgtagaagaaccagttattagacgctaaccccggcatcgggtaatacgtttttgagtttccgtatgttctttcttcgatccgttccataatcggcataacggatgccgtgctggattggacgtaggaaatggagcctgtcggcgcgatacacagtctgtagctgtggtacatgccgttttcagcgacaaacgccttcagctctttccagtcttcgattgtcggaatgtgcatgccttcaaagagcgcagcgattttttcgtatgccggcgagaactctttctcgatgtatttattgaaatattctcccgttgcataagtggagccttcataatgctcaaacgtttcgcctttttctttcgcaagctcagctgaacgctggatggaataaaagtttaccatcataaagaacgtattcgcgaagtctcttgcttccgggctttcataagcgatgccgttttgggcaaggtagccgtgcaggttcatcgcgcctaaaccgatcgatttcatcgctttgttcgcgcgtctgactgccggcgcgttgcggatatccgtcgtctcggacacatgagtcagggaatccgtcgcaagtttcaccgtgcgctcaatcgatttatgtttcatgacattcaaaatatttaaagaacccaggttgcaggaaatgtccaggccgatttcatcttcttcgtcataatctgtgtaagctgaaacttgtgacgcctgaagcacttcagagcaaaggtttgagaatttcacttttgagacgtggttattcgcgtgctctttatttacgttgtcctggaacataatgtacggatagcctgactcagagcggagaacggcaagcttttcaagcaatttgcgcgcattcactttttcttttttgacgcgcggattgtcgacaagctcctcatacatcgccgtcatgtccatttcgtccatatgctggccgtattctttataaatcgtatgcggataaaagacataagcggctttatcctctctcgcaagctcgacgaacttgtccggaatcacgacgccgatggaaagggttttaacgcggacgtcttcatcagccgagatttttttcgtatcaagaaaatcattaatatcccggtggaaaatgttcaggtatgccgcgcctgagccttgtctttgccccatttggtcagcatagcggaacgcattatcaagaagtttcatcacgcctacgacgccttttgtggcattttccacatctttaatcgcttcgcctttggcacggagcttcgacaggttaagtgacacgcctcctccgagcttcgaaagctgcatggagatgtcgatcgctcttgaaatatcattcagcgagtcattgacttccaaaaggaaacagctgaccagctcgccgcggcgtttgcgtccggcatttaagaatgtcggcgtgctcggctgatattcctggttaatcattaagcgcacatagtctttcgctttttccgcgtcgccgtttgcaaaaaacagggccacgattgaaattctgtcctcgtaacgctcaaggatttttttcttatcattcgttttcaatgcataatcgttataaaatttaaaagcactcatgaaggatggaaaacgaaatttcttcgcgtaagctgtcttgaaaacatcttttatctcttcaaacgaatagaggctcaaaaactcttcttcgtaatattgattttcaatcagataatccagcttctctttcaaatcgtgaaagaataccgtgttttgattgatatagtcaacaaaatagctatgtacagcctctttatctttatcaaactggaattttccatcttgttggatcataatttcgttatttaactgaatccattttggcacttggttttgtgacaactttttctacctcctgagtaaacaattcaacgtctttcgctgtgccgctgagttcaaatttaagaaggaccggcacctgatactgctttgagatcgtgtcggcgcttttggcaaaattctcaccccagattttatttccgctcgctgcgactccttgcagaagatgggcgtttttttcaagaaatgcctgcgttgatgccggcacctgtccgaagtttgtcgtgtaggtcaccagtacaaacggagtgtccagatcttcaatttcgtccaccttgcggatcagctgaaagtctgttttattcacaaaacgctgaacattccctgtctttgaatcaaatatgatttgaaccatccatatcacgacctatcaaaaataatgaatctcttaacactatatatagtatactaacctctcagaaaaacacaacatattgagatcgatttataaaaagttcatatttttgaaagagcggaccttggttctgccccgattaacgcccaaaaaagagagcagaacgagaatcatctctcatcctactcaaggtgtcatgtgtaagccgatgtctatcataacatgaaaaaaaactgcttagtagtctagacttttattcttattttttgtaagaatcacattttttttcgctttcaacggtttcttctatttccacatcagcaccgatttctttcagtacggatttcagagcgcttgtaatggaagcctctctgatcagttctttgccgtcaacgatgatgctggttccatattcatagcaggaatcatcttcacaggtttcttcccaatggttgattatcaccttgtgtttcaatcgtctcaccctctgcatgatcaatgtcagtacctagtgtagcttgtgcggcctgctttgtaaattcgaacgcttgtgaaatttattcaagctcatccagcgccgtttcttttttcagtttgattttattcgttttttcatcgtagcggtatattttcatgtaaccgtcctcaacgacgccgaaatggttatgttccagctgcaccgtgctttcagtctgcggttcggtatccgttgagccgccgtcatgatccgtcaccaccgtctcatgattgctgcatgctccaaacagcaaaaaaacagcgatccaaacgagcgtaatcctgattcttctcagttcattctcactttcaaacatggtgttccgagcccccttttatgtttccgatctccagccggcaatatacaggcgcgcataaaaaaagaccatgcttcatggtctttggcaaaaaagtctattcaagctcaagctgaacgtttttttgcggggcgaacgtggagatggcatgtttataaataagctgctgcttcccctccgtttcgagcaagacggtaaagttatcaaagccttttacctggccgcgaagctgaaagccgttgagtaaaaacaccgtgacgaacgtattgtcttttcggatttgattcaaaaactgatcttgaatattaatcggtttcatgtttcgtcctccttggttctcaatacaatactgtttcgattaaatttccagttttcctgctatacactcgaaaatttcctttattttctgttcgatatccacaggcggggtcatatcggtccatgagacggacattttattgcgaaaccaggtcagctggcgtttcgcataacgtcttgaattttgctttaattgttccacagcctgagggagcggcacttttccatccagatattcatacagctctttatagccgatcgcctgaatcgattggctgtcccggatattcatatcatacagccgcttgacttcagcaagaaggccggcttccatcatcaggtcaacacgatcgttaatccggccgtacagcacttctctgtccattgtaagaccgatgagtaccgcattgtaaagcagctcccgtttttgggttttaagatgctctgacattgtttttcctgatatgtggagaatttcgagcgcgcggatgactcttcgcgtattattttgatgaatggccgccgccgcttccggatcggctgccgcaagcttggcatgaagagcttccgccccttcttctgtcgccagtttctccatgcgctcccggaatacaggatcaccggagtgttcagtgaacgtataatcatacagcacagactgaatgtacagaccagtccctccgacaatcatcgggagctttcctctgccggcaatctcgctgattttttccctcaccattttctgataatccgccgttgaaaaagtgtcggacgggtccaaaatatcaatcagatgatgcggcacgccttctgtctcttcttcggtgactttggccgtaccgatatccatccccttatatacctgcatggaatctccgctgatgatttccgcattcagcatttttgcgagtccgatgctcagttttgtttttccgactgccgtcgggccgacgagtatgacgacaggctgttttgtatttttcaatatgtatcactctcttttataaatctccccctgattatagcattcatttctccaggcacctatccattttgcccttttttctgagcgctaaacgtcaattaccacccgagcggctcgttgccgacaacctctctcgtttttcctttgagcttgtggtggtgtgttttccggtcttgctcccgcggatcgtaaacgaccccgccgtagcggatctgaatcggctcattgtaagcggcaaaggtggtctctgcaagctcatgataatgtgttccgtcaaccctcggaatggcagggccggaaataccgtaatacctatggaaatggccgttttcaaaagaggtgatgcccgaataaaaatgtgtatgctcatctgtattgctgccgttctccggctgtgaaaagccttcgatcaaatggtaatgcccctgcactacatccgttacagcccggtatgcgtgtgtatgcggaggtttttttgaccagtcggactgatacaggcccacaaaagctcactcctttatttttttgataaacgcccaatcaaaaattggtgggctgaatactctgttatcatctcaaatttattcttggaggtacctaaattatgaatgaagaatacgcatacgcagcagatagtgatatgagacagtttggacgtcctggatttggttttggccggccgggattcgggttcggacggccgggttttggttttggccgcccttggtttggccgcccttggtttggctatggattcggacgtccgtttggatttttcggcggtccgtttgccggagggcttgtcgggggtctggtcggaagcgccttattaaatccgtatttgtacgggggttacggctacccttactatccgtattactactaagacaatcaaaaagggctcctttcaggggcctttttatataggccgaatgtcttgacttgccgggtaaagttcggatattattttattttactgccttaaacaaaaggcatgaagatgatgatgagagggggattggatatgattctgggttatatcttcctcacaattgctattttatcagagtcaatgggtgcggccatgctgaaggtctcccgcggatttacgcggtttgtgccgagcgcacttgtagtggctggctattcattggccttttatatgctttcactgacactgaatctcattccgctcagcttatcctatgccacatggagcggggccggaacggtgcttgcgtccattatcggagcgaagtggtttcatgaaaaactggacaagcaggctgttatcgggctctttttcttattggccggtgtcattttgatgaattggtagaaaggagaggcatgataatgaaaggattactctgcttggcattagccattgtatcagaagtgttcggaagcacgatgctgaagctgtcggacggttttacccacctatggcccgctctcggcgtcattgccggaatcggagcctcttttatgtttttgagcttctctttgaaaagccttgatttatccaccgcatacgcgacatggtcaggtgtcggcacggctttaacggcgattgtcggctttatcgtttttaaggaggccatgacagtcaaaatgatgatcggtctcgttttggtcatcacaggcgttatcctgctgaaccgttccaagtctcaaaaagctaaaaaaaatcaaacggcccggagctgaccgtttgaactcatcaatcgcgggcggcttttacttccacttcaagctccatctccacgtttccctggaccgctcgtgaaatcatacacgaggactccgctttttgcgccagctttctggccagcgtaaactccgtttcagttgcacccggctttaatactataaacgggcggtgaatgattttttgatatgtaaatacaccgtttgttacgtctacaattccttcagattccatatgtagatcttctttatccagaccgcttctttccatcattgccgcaagcgttataatataacaggtcgcggccgctccaagcagcatttcatcaggatttgtgccttctcccggtccgtccatttccttaggaatggacacagctgtttccagccggccgcttttaatatcgccgacgccgttccgatttccgggccaatttgcttttaaataaaaatggtgttttgccaagggacaatcctcctttttttcagtttactcaactttcactggtttgtcttattttaagctcaagaatactcttgattgatcactctttttatcgtacggacataccggtaaaattcctccgtttttgtgaattctctttcgcggtaatcaaaattatcaaaaaacgcttcccgttgttctctgctgatctcaagctgtatgctcagcccggtttgggtctggttattgatattttcgatgtcaactccggacagcccggttcttgaggttgccaattctgcagaaaatccgtttcgtttaagagctttcaccaattttttcgcccgcttccggtcacttcctccgacaagagtgtttttctcgtcgcttttataaccgtgaactgcgataacataacggtgctgtttaatgcttttgactgctaaaggctcatcgaacttggtgctcgtaatatgaagggtctggttatcatgcgtttttaatccctcaaacaggtaggttgaaaaatcatctctgaaagagcggacgatctcgctcaccccgccctcaattctgcccccgtgcggcgacataatcaatacagagctcccctcttgcttattgtacgatatatgataatcatcggggtcttcgtgttcagccagatctttaaaatctgtgtatgtatcagaggaattcgagggatcagggtctgacgcataatgaacacatcttattagtaagaccattgctacgataatgatgacattaagtaaaattctcttcatcagttttccttttgttctcctttctgaaaaatgaaatgttcattatatggttttttgtcaataggtcttatcttaacattctattcacattatcatcagtgaaaaacttcccggtttcaaaaaatcaatggattgtcacggttcaagccttcagatgccgggcatcagtgaaaaaaggttgagagaaggcaaaaaaaaagggaggaatgcccgaattttcacggacgggagattgacagaggaaacagaaaacatcaagaatacgctcttaaaaatgcagatccgcctcccgaagcaaatgcgcaggacagaatggactccgtcaaaaaggttctcatctgcctttttgtacagcagaatgccttcacagcccgctcatccccttttttaataataatggtccgttttgaaatcgagccgtcttttttcatatatataatatcaattggaagctgcttttccaaggaatgtctcaatatcatgttcatatttatacctccttctgtcggctttattataaacgaacaagtgttcgatttcaacttattcgtttctttttcatctgaaaaagccgcaagtaaccagctctctgaaggacaaacaaactgaccgaacatacagcctgttcatatggtatagagagaatcgccagaatgggaggaaaagtatatatgtttggttactcaatggtacaaatggtgcggtcaaatgctcataaactggactggccgctcagagaaaacgtattacagttatataaacctttcaaatggacgccttgctttttgcacagctttttcgaagagaaggtaaaaaacagaaagaaaatgtcagtcatcattgaattcgaagagggatgccacgaatccggttttcacagcacgggtcaggtcctatcaaatgagaaacgctgcactataaaaaagcagtttcaaacatttaattgctgcagcgcggaagtcaccccgtccgcccttcatatgcttctttctcaatgccgggatatccgtaaaatctatttaaaccgtgaagtaaaagcacttcttgatacggcagcggaatcatcccatgcaaaagaagtgacccgaaacggcaccgtattaacagggaaaggcgtaaccgttgccgttattgataccggaatctatcagcaccccgatttagaaggcagaattaccggatttgccgactttgtaaaccaaaggacagaaccgtatgatgacaatggccacggcactcattgcgccggtgatattgcgagcagcggcgcatcctcttccggaaaatatcaaggaccggcgccggaagccaatctgatcggtgtcaaggtattaaacaaatcaggatcaggaaccttggctgatatcattgaaggagtggaatggtgcatacaatataataaagaatacaccgagaacccgatccggatcatcagcatgtcgctgggcggagaagcgctcagatatgacaaagaaacggatgatccgctcgtcaaggccgttgaagaagcatggaacgcaggaatcgtcgtctgtgtcgccgcgggcaactccggtccggaagcacaaacgatttcaagccccggcgtcagtcagaaggtcatcacggtaggcgcctatgatgacaatgatacgccgagcaatgaagatgatacgattgcttctttctcaagccgcggcccgacggtatacggaaaagagaagcctgatattcttgcacccggagtcgatatcgtatcccttcgttctccgcgttcatatcttgacaaattacaaaaatcaaaccgtgtagggtccttgtatttcagtttgtcgggcacatccatggccactccgatctgtgcgggcatcgccgccttaatccttcagcagaacccgcagcttacgcctgacgaagtgaaaacactgatcaaacaaagtccggataaatggacaaatgaagatccgaacatttacggagcaggcgcagtgaacgccgaaaacgccgtaccgaaagaataacctttttctcatgagaaaacgggatcgtctgcatcagcagatgaccccgtttttcagtaaacagcagaaacattataatgaagaaactcggaactcttcatatcctgctgtcagaataaaagatgaatgcaagacagtgtatttctgaaaaaatagggaataagtatggtgtagataaaaggaggaatgacaatggcactcacaaacaccgaactgtctgaatggctgcaaaagcaaatcggacaaacgcttgatatcagaaaaggagagctgacagacagccggaatgagatttctgatatggatcaaatcatgcttcaccttgatgatgttctcgtccgccgaacaaatcatcccgatgactatgtagcggacgaagaactcgtcttaaaagggcacggcacaacctatacggaggaaggcaatgtaccgctccctcaagatgcgtatgaaatccctttgcttggtgacattaccattcaaaaagagcagaacggattaaaggtacatacagatcgggccgtttatacaatcgggacccgacaagagcaataaaacgaaaaaaacgccctgaatcagcggcgtttttttattggtttttttcttccgaataaccgtggaacatcgtgaatgcgcaaagcataatacctaaaataatgataatcgggagccagataacggcaaatttataatccggttcggcaaaggcgccaatgaccgccccgaagcaatacagcaccaaggcaagcgcgcgcaaaacagcatctctcgtaaactgcttccgcttgtccgatttgtaaaaccttgcggtgagatcttcaaaaaaattagcaagcgttcccgttaatacggtcgtggaaatcccggctacaccaagttttctcgcggctgtcgtctgcattcccattgcgaagctgagcagcataatcagcacataaacagaaatgctctctgcaaaaaaacaagagaacagagcaaacaggagcaaaacagctccttcaataaccaaagccgcagttacggcaggcggccagaatgacttctttttattgccgacaagcacggcggcggcaataacgccggcaataaatccgattaacgaggttaaagatttgagtacggcaaggtgccatgaattgccgatcgcaaggccgaacagaacgatattccccgtcatattggcggtaaagacatgccctaaacttaaataaccgatcacatccacaattcccgcagttaaacaaagaagcaaaagtgcaatatttcggtatgtagtcactgtcaatgtgatccaatcctttctcatgccgatttccaacatataagtttactcttcgcgatttcatatgtccagccggcacgcctctttttcaaagcaaaaaaactccggcgaaccggagaaggttactgaacgataaataatactctcgtaccgtcggaatatccgctcatttgatttccaacccatgaaccggctccgcgattatccgaaggggttacatatctgatgtcagcccctgccccgccttccgtacagactgccatcggccattcatcacggtcaaacccaggctttgtcggaatgcctttcaatgattctttccttctttcctcagctccgccgcgatcaattgtacaaatgtcagaatgccctgccgaaatggcatcttttatatgattccccgtctccggatattttaacagcgggaaatacagcacatgatcatatcgggatgcagcttcagcagtattctccgaatggatgccggcgcccataaagccgaactgaagaaagatcaccaaaagcagacttgccgtccatttcataaacgcagccattcacagcctccttaagaagttgatatgaagcgtaaatatgtatattagccggacttagcgcacatgatggaatggaaaaaaaagtatgttgttttgttgataatcaacgaaaatggcggctttacgatttgtctgttgaaccggcttctgtttccttatatagtttagacatacttatgagccgttgtaatcaggttcttcggcggataataggaggaatgccgtccggtcgacaggcaccggctgtttgttatgtctttttcaaaaacatgaaggcggggaaatcaagatggaaaaaataatgtttcacccacactcatccgagtttcacgaaaacccttttgcggtactaagcagattcagagagcaggatcctatacataaattcgaactgcagcgtttcggaggcacctttccggcttggctcatcacacgttatgatgattgtatggcgtttttaaaggacggaagaattacaagagatgtcaaacgggtcatgccgaaggagctgatcgcgaagctgaatgtcagtgaagatatagattttgtatcagagcatatgctggcaaaagaccctcccgatcattcacgccttcgatctttggtgcatcagggattcactccccggatgattgagcagcttcgcaccgggatagaacggatcacagaagagctgctggatgaaatggaaacaaaagcagatcctgatatcatgagagatttcgccgcaccgctcccgtttatcgtcatttccgagctgctcggaattccgaaagaagaccgtgccaaatttcaagtgtggacaagcgcgatggtcgacacgtcagaaagcggacaagatgcgaccaaccaggcgctcagagagtttaaacaatatatgcaaacactgattgaagaaaaaagaaaccacccgggtgaggatctgacaagcaagcttatttacgcagaagaggacggccaaaagctgagtgaatcagagctgtattccatgctgtttttgttagtcgtcgccgggcttgaaacaacggttaaccttctcggctccggcacactggcgcttcttctccacaaagaccagctggagaacataaagcggcagcccgacactatccagacggcggtcgaggagcttttgcgttatacctctcccgtcatcatgatggcgaatcgatgggcgattgaagatttcacgtataaagatgtttccattaaaaaaggcgatatgatttttatcggcatcggttcagccaatcgggacccggaatatttcgatgaacccgatacattaaatgtggcgagaacaccgaaccgtcatatctctttcggtttcggcattcatttctgtctcggagccccgctcgcccggatggaagcatccattgcctttaatgcgcttttaaaacggtttccgaatatagagctgaacggctcgtccgaggatttgacatggagaaaaaatgtgtttttaagagggcttgaaacattgcctgtcaaattttgatacccgccccctttttgggggctttttaaatgtcttataaacaggaaacaataaatttatatgaatatttagtacatagtaaatttagttctgatttaggcaaaaaagctgccggattgctccggcagctttctctattaccgttttaccaactcatttgtttcgtccagctttttcctgaaagatttaagaaaattggcgcttatcgtccctttgtttgcgtacagcttttcgcaaaatgccttaatggcgttttgcggctttgtttccgtcagcattgtaacatgattggaagaatgcacgtccagcaggtgaaactgttttatctgccgttcccattctttccaatacgcatcatagtctaacggaatttgttcttcctctgctgtgagataacgttcaagatccccgagaaacaaaccgcttttatttcggaaatagtagcattgcagcgcttccggatgaggcagcggcttcatgtcatactcttccattccgtaagcgagctgcgtcttcatcatttgctccagctgcatccgtatcgcttcttctgatttgggcaggccgcgctctttggcaagtgtgatcaattctttcagtacatcttcttcctcagcctgaacggtaatgtcttccctgctgattaatgcctcttcagggttttcaggcttgagatatgccgtaagcatcgtattgatcgtttgcagcatgactgacttgatagatggttttctttctttccatttttcactgtacggggtatcgatcatgacggcgcttttcaccgtatgccctttctcctgcaagaggcgcgctgtttcatatgcaagcatgccgcccaaggaatatccgccaagatcatatgggcctttcggctgtacagcttggatgattctcacataagaagcggccatctcttcaattccttgcagcgggtctttccctgtcaaaccccttgcctggatgccgtaaaaagggcgctggctctttttggcgaaaggctgatacgcttcaacgcctcccgttcctccgtgaaaccaaaaaacaggacggcctgtttccttttcattcagtttgacgagttcgggaaaattcccgcccgcaccttgcgattggttcgtttttaacagcacgttgagctcctgaagagtaccgcagttctgaagagcttccagacttatgcggctgtctgcgtcctcaagttttttcagcagctgaatacaggagaatgaatcgaagccgtattcagtcagcggcttattttgatcaatttccgccgcctccatccccaaaatgtcagccacaatgtcagccgcatccccgcggcgggactgagggttctgtgaaaccggcggaaggctgatgtcttctgtccgaccgcctttccaatacttgtgtttttcaaaagggtatgtcggaagcgggactcgtcgaacaggtttaccttggtggagtctgtcccatggaatgtccgcgcctttaacccagcaaaacgccagcttttccagattattttctgccagaagcgtctccgtaacgactgtaccgagtgtcccttccagtaaaaccccgatatctcctgatccagtctgctgactgcctgtaaagaagcttttcattcctttgctttcttcggaaaactctctgtaatctgtcagtttttccagcagttcatcttgattgcgggcaacgagtgccaggcggcagttcatcgcctcacgcccggtctgaagcgtgtaagcaatatcccgcaatgacggaatatattcagtttgtatgaaagcagccagctgacctgcggccgccttaagccgatcttcgctcttagcagaaagcacgataagctgcggttcatgtgcagattccgtgtctttcagacgagggctgtactgttccaagacgacatgcgcattcatgccgccgaagccatagctgttaattgcggcccggcgcggaatcagactgccattatcgtcggtgagctgtgtccattcttgattgtcttcggtgaaacggaagcggctttgctgaatggtcatttgctcatttgcagctgtaaagccgggaatgcccgggatagtatgatgcttcatggccatcgccactttcataagggctgccagtccggaagcgagttcgccatggccgatgcaaggtttcacagtgctgatataacaaggcgcgctttcctcctcattcgcaaactcgccgtagcccgctttgatggcattgaactccagcgcgtctgccatttcggaggcaatgccgtgggcttcaatgtatgtgacggtttgcggatcgacatcggtgccctcgtacgcttttttcatcgcggccttcattcccgccgggttcggcgcgtgaagcgacatgcccttaccgccatgagacaccccggttcctttaatgaccatgtgaatgtgatcaccgtcttcaattgccgcctcgagcggttttacgatgataacgcccgccccttcacttctgacaaaaccatcggcatctttttggaaagatttcgcccggccgtttttgcttaaatatcccattgaatcaaatccgataaagcccttcggtgactgcagaatattgacggcgcccacgacagcctgctcacattcgttatgacggatcgattgaaccgccctgtgcaatgccacaagcgttgacgtgcaggcagcctcgtaatattcactcggcccttgtaaattcaaggcatatgatatcctgttcggaatgatggacggaatggatgttccattgtttgggtcgctattgcccgcggcaacgaaaacgcctgtcggtctacttgataacgccttattggtcaggcccgcatcctccattgccttccacgtatgcatcaagagcagaaactgctcaggccccatttgcgaagcctctttaggagaaattccgaaaaagagcgggtcaaattctccgactccgtcaataaaaccgccccatctgaggcttgtgtcatcctcatcatcggcgtaacggcgccagtcccagcgctccgccggaatttctgaaatacagtgatctccgtttacggtgtgttcccaaaaagactggatatccggagattgcggaaactgacctgacataccgataatggcgattccttgcttgatcttactgttatcacagggtggatgctgttccttcggcaaagttggcgcttcttttgttaccgaagcctcttctgtatgcttgtgatcggcaagcaattgagaaaatttgctctcatgtgctgacgcaaagtagcgggtcagctcttccgccgtaggatactcgaaaaacaatgttggattcacatcgatttctgcctcttcgccgatctcttttgtcagtccgatcaggcttgcggaatcaagccccaattccatgatattagcatcagaacgcagggatgacgcaggttcatccatcatcttggcgagcttgccaaggacatagctgcggatatgatctgtcagactgccggcagaaatcgattctcccgcgcttttcacagtcgttcgagccggctgattcatctgaaacgcttccgggcggaaccgtttcagggcatagccttcataacacataaccacttcagaccggctgttgattacatctgcgttaaacaggatcatctcccctgtttgtttggccagcttgatgtgcagccagcaatcggtgagattttccgggctgccgaaggtgacggaattaatgccgaacggcagatagctttctgcatccgcttgatccaataaagaaagcgcggacaagtaagcactgttggcgattaacggatttatagcataattttgcgagtcgccattgttcagattcagctttgctaaaacggcatcagtgcctttgtataggcgggtgatcgttttaaattcttctccccacacgacggttcccgttccgtctccgtataactcatctatccgtcccacttcactgtaagagcgctgaatggccgccagatccgcgtgccgcttctgaaacggatacggactgcactcggcatacgccgctgcgctccaatcaggagatgtacggctgcggtacatcatgcgcagttcaaaagcatccccgttttgttttgattctgttttcagctcgatgcgatcgcctttttttacggtaatgggattgacgtaattcagttttttaatttgtcctccttctgcatcgggaaagagatgataaaactgctcggccgccagacttttgtatgtagcgccgacgagtacaggttctccgttgaattgatgcccttgcacatatggatcatcatcattgtatttcgcctgaacgccggccgcgttttctgcttcaccgaaatgaaaagaagtccggtggtcaaaagcataggccggcagatgaacggcgtgctcttgctccacctgatcaaatgcgatattctctcctttttcccattgccgcgcacgattggcgatagcagaatcggagaaattgagattcggctgatccaagcggtaagcggccagctttttcaccagttcctgaacggttgaagccgtaaatgccgcccggtactccgaatgatgcgttcttttttgtagcgcggatgcgacagcggccggatgaagagatggcgtcttttctaaaaaggccgccagtctgtcaagataggcttcaaaactccatttcgttttcgctgacacagggaaaatatattcctcagagctgttgcggttctgatggaaatctggactgatatattcttctatgatcagattcgcatatgccccgcctgccccgaaggaattaatcatgcttctccgcggtatgatgtctcccgtcccggcatccctcatacgctcccaatgctcggttttttcctgcaggtaaaaggctgtttgttcaagcgcgatattcggattttgcggtttagcgttaatggtcggaactaacgtttcccgctccatttgcaatagcacttttgcgagctgggacatgccggaggccgcctctaaatggccgaggtttgacttgacggatccaagcgcgcaaaaacgttttttatcggtatattgcgagaacgcgtttgtcagggcaatgacctcaatcggatctcccaataccgagccgtttgccgctgattcaacataaccgattgtttccggatttattccggccttgctgatggaagccgccatgagcttcgcctgctgtttcggatccggcgccgtatacatctgccttcctccgctatggcacaacgcgctgcttttaatgacgccgtaaatatggtctttgtcggcaaccgctttggagagcggcttcaggagcaccgccccgaccccttcgcccggcatcagacccgtgcctgttccgaagcttttactttcacttccctgttcaagcaaattcgcccgttcgagcgcatcatatttagacggttcaagcgtgagattaacccctccggcaattgccatggaacagctgttaagcttcaggctttcacaggcgagatgaatggcgctcagtgagctggagcatgcggtcgtcacgcccatgctcggacccgttaaattgaaaaagtgagaaatccggttggcgatgtgccaatcccctccgttagagctgagcgctgctttttccaatgacgggatattccaaaaatattgattgtacatactgcccataaaaacaccgatgccgctgtctgcttcctgccacttgtttaatctctctaacgagtagcccccgttttcaaatgtttcccatacggtttcaaggcttaaccggagctcaggtgtcatctccatcacatggtcttccttgatgtcaaacaggtgatggtcaaaagcgtcaatatgctgcagaaagccgccgtaccgtgtttttcggtcttcttttcgtgtttcttttgccattgttttcagaaggcccgacttccatctgtttttcggagcctctgtaatacagctgtctccggcttttaaatgctcccacagctcatcaagtgtttcggactccgggtagcggccgctgatgccgataatggcgatgtcatcccgatcagagcgattagtgtcggcggtttctgtgtccggcttgggcgcttccgcctctttcggttcagtgataaatcgccgtgtttccgttacaagcggcaccggttcctctattacgggttcctgcttcttcgtttcagggggcgcttgttcagctccaaatgcctgctgcagcttatcggggtaagtgtccagcagatactcggcaagttctttcgtattcgtgtgttcaaataagaccgttttcggcagctcgccagtcaatgtttccaattcacggataaaattcacctgcaaaatggagtcgatgccgtatttttcaaagctggtttccggctgaattcgctcgggcgcaagctttatcgacttggctaacgtttcttttatgaattgcaccgtccggtctgtgactgaggaagccggttctgtgaattcagccggctctttggaagccgcaatttcttcaacggcctgcgcgtccggctgcttttgcctgatgacgccgtcgctttctgccgccacgatctgctgaccgagctgatgtgacgattccgccataaatgtaacgtatcgatatccctcgctttccagcacagactgccacgcttcaggatagagccccggacatccggggatgcgcagctcggcgtcctcataaagccaccagccttccaaaagaccgaatgtcaggtgagaataaaccgaatggctgctgatctcatttaatagcaaaatcccgttctttttgagcacggctttggcattgcgaagcgtctgccgaatattttttgtcgcgtgaagcacatttgccgcaatcacggcatcatatgcgcccgcgtctacatcctgcaaagccggcggctcttccacattaaaccgcttataggtcaaatacggattgtcgggcccgtattctttttcagcatgcaggaaaaaggcctttgacagatcggtatagcaatattcttttacgtgatgcttgtactcttttaatcttttaaaaacggtcgcgcttgtcccgcccgtacccgctccgatctctaatatccggatttctgcgttcgggtcttctttcaggcgttcttcaataaaagctgtcaatgtgtcagcgagcacctcattaaagtagtctgccgtttcattatttttatagattccttccaccaattccattgaggaatcaggaaacagaacatcagtggcagaaactctgccggataaaatatccggcaaagctctgagggctgtctccaccaatgtgatcatcgcctgtttgctgctgtccttgagtaaaggagctttcttttcatcccattcttgccacagcacgtccgcatgctctatcggccccgttaacacatacgtactgcctgactgttttaaaaagccattttgcaccaagatggagatgctttcttccagccacctgccgtaaaacccctgcaatacaggctgcgtcttgttttctgtaaaaaatccgacagatttcagctggcctgccaatagtttgtaaagaagatcttccgtgttttgcaaagccgtcccctccttaactcaattgttgtacatgtcttgttactttaggctgatagcttcgcagtttttgcatcgccgagccgtgatgttcagggtatacttctatcatttcttccggtttttccacaggctcttccgcctgtttcatcatgacgaattgattcaatgggccgccgagcaaccgctcaagcgccgccatcgcttccggcgcttcaatcgatccgactcccgcctgtttcatccgttcttgatattcagcagatgatacaattccgacgctgccccagtagctccaattcatcaccgccgccgaatacggacacacttgagccaaatgagcggcaaaggcatctttgaagctgcatccggccgcataattgctttgtccggccgcgcgtgcaaatgattgaacagacgagaagaacaaagcaaagtccagcggctcatttcggaaaacgcgggccatattcacgctgacattgacttttgcagcgagcacacttttaaaacggctttccggcatatttgccagaccctgatcctctaaaacgattgcggaatggatgattccgttaatatgcgggtgcgtgcgtttgatcgtttcatacgcacatgtgagctcatccggatttgccgcgtctgcttcaatataaattggcgtcggcccgaattggctgagtctgtcgattttttcccggatagcgctgttatgttttcgtctgccgatccaaacgacgcgtgcctgatacgttttcacggcatattcgctccaagcctcgccgatgccgccggcgccgccgatcacgacatagacgccgccttttttgtaagcaggccggtttgacaccggctgctgcacaggaatgagacgctgtttgtaccaatgattgttccggtacgcccatgtattgccttgctcatcaaacggcgctgagaacagctccgcctttgaaacatcttccgggcttccggcatcaatcagccttgtttgccagcttggatactcttttgcaagcgagccgaccaaaccgtgaatgcctgcatgagccggatcaatagtgtcgtccggctgtacggactgtgtttttattgtgactgcggtcaggctgatccgcttgcctccatatcctaaagcaagcattgccttgatcactctgtacatctggatgacgcccgcatcctgggctttcaccatgtcactggcggtgtgaaaaggggcgatccatacgatatggccgaatggccctctggctttcatttctgccgcaacagcctctatttcatcctccggagtgatatggagcctttttgcagcaggatgatgcatttgaaaagccgcgctctcctcatcccccgcgataaagacaacctcttccgtctcacatgcagggctctggccgcggaattccgctagatcccataccggagccagaaggtttgctccatttaatgatgtttccggcgcagggccttccatcattctggaagaaatccctttaatcctgacacagaccctgccgtcctcatcgcataaatcaatgtccagccgctgaattttttcatccgttccccgggagctgacatacgcccacatacttgttgtgcatggactgaaaatgtccagttcctcaagagcgaacggcaatgacagctggttatcatcagcgtgcagtttcagtccgattgtcgcttgcaaagctgaatcaagcatgcatgggtgaagaacatattgatctgccgtttcttcgaggaaggaaggcagacggagctcagccaatgcttgattgtttccgatgtgaatctgcttaattccttgctgtccgggaccgtaatcaatgccgattttgctgaataagccgtaacactgctcagaagtcagcatgttgtggccgcattgagctttcagtgcgcctatattacgctgcggagccttcccgtcgctgagaatgccggcagccccctgacagtgtatctgcctgccgcttgcttctgtttttgaagccgtgtaaatgtcatatacgatttcaccgttttccctcggaacgaggctgatctgcgcttcaatcggacggctccccgcttcaatcggacgaacccagacgatgtttttcaggcggatggcagacggacgttccttttgtcctttgactgcctgagtaactgccgcccgggccatttccaagtaagcgacacccggcatgaccggtttgcctttaatcagatgatcggtgaaaatcgtctcttgccccgtaaattcggagcggaaacgctgctctgttaaatccgatacgttttcgtgaagaagcggatgcagcacccgggccgtcgccacggcttgcggtttctctgcttttggccggttgtccgtgatccaataccgctctttcgcaaacggataagtagggaggctcattcgacggggcttgatatcagcatataggccgtcccatttgatatcactgccctgcacccataattccgcaagcttgtcattctctcggcggctgatcagctcttcgatatccgattcgccgtttccgcctgcggcaacggcgttcagcgcggttttacccgctttgcctttataaatacccgccgcgtcataatgtccttttgcacagctattcagcttgtcccgcagctcttcggccgaggaagcgatgatggccgctctttcttccatggcatcacgtccctgctgaagcgtgtaagcaatatcggcaagatcctcgtccgtaaaaggagcttgtgccagctgttgcgcctgttcttgcagacgttcttcttctttggccgacagcacaaagatttgaggatgtttgacaatgacggtttttctttcttccctcgggatatattcttcaatgacaacatgggcgtttacgccgccgatgccgaaagaactgattcccgcgcggcgcggcaggtaattgccgttttcgtctttcaatgccgtccattctcttttttcctgtacgatgtaaaacggactgtccttcagtttgatatacgggttgatgacctcgctgtggaggctttttgcgagtgttttatgcttcatctgcatcagcactttgatcacacccgcgacacctgctgccagcgataggtgtccgatattggttttggccgaacccaatccgcaatgactcgcgtaaacggcgggatcgccggttttttcgtacagcttttgaaaggcggatttcaggccgttgatttcgaccggatcgccaagctccgtcccggttccgtgcgcttcaatataagtgactgttctcggatcaatacctgctttgtcataagccgttctgacgacttcggcttgggctttcgggttcggtgtcgtcaaggagttcgcgcgtccgccgtgattaaccgcgctgcctttgatgacgccgtagatatgatcgcccgctttttctgcttctgacagctttttcaggaaaagaattccggcaccttcactgacggcaaatccgtccgcccggtcggagaacgttttacatttcccttctttgctcagcgcgccggctttgtcataagcaatgtggccttgcggggtgacgacggtattcacgccgccggcgatcgccatatcgcagttcccgttttcaatggcgcatacggcgtgatgaatcgcgaccagtgagctggagcaagccgtgtcgatcggttcactcggcccgtgcagattgagcatatagctgacacggttcggccccgctgacgggctcatatttgcggctgacgcaccgccgatatccaagtctgaaaatagtgagccgtatccggtattcccagtgccgatgtaaaggcccgttctcgtgccggaaaggcttttagcggaatatcccgcatcttctatcgctttccacgcatacatcattaacaggcgctgctgcggatccatctgttcggcttccagcggtgaaattccgaagaacagcggatcaaaatccgcaactccgtcaataaatccgccccactttacatttgttttgttggcttcataaagcgggtcaccgtaatactcccgccagtcccagcggtccgccggcacctctgttatgcaatctgttccctcttccaagttactccaatactcatcaatatttgcggccttcggaaacactccgctcatacctacgatagcgatcggttccggtttatgttcaaccgctgtctgaacaggctgtacggcagtttttgcaaagcgtttgttccctgtcagcctgatgccgccgtcatctgttactcggctttggttttcttcttttttcggctgtgtgctgccggtaaattgtgtttgatagtcttctgctaaatgatgagccaaggcttgaatcgtcgcatattcaaaaaacacggtcggtgtcaaatcaagctggtaagagtcattcagtttgttggcaaattccgtcagcgtaatggaatcaaatccgtattgattgaactccaaatcgatatctatttcttcaatatttattttcagaagtccggaaacctcttttgccagcaattcctgaagttttgccgtcaagtctttcggcgcaggcgtttcctccgtttttttaaccggtgaaaaagcggctattggcgtcttttgaagcagtttttcccgcataacggcgagatttccttccatgacgagcacacttgttttccccgtgctccatgctttgtaaagcgcttctattccggtttcagtgcgcatcggcgccacgccggttcttttttcggtgagcttcgccatttcttcattgacttgcattccgccgtctttccaaagcggccaattgattgacaatgtatgcccatggcggtacattgccttaaccagcgcgttgcggtatgccgcatagctgtccataaacgcgtttgccgcagcataatccgcctgtcccgcattccccgtgacgccggagatggaggagaaaacgatgaaaaagtccagcgctaaatgctcggttgcttcatcaaggttgacaaatccatcggttttaggcgctaatacactgtgaaactcttcagttgttttcttcgcgatatactgatccttcatcacaccagcgctgtgaatgatgccgtgaagtccgccatattccgtctcaattgttttgatcagatccgccgcagtttgagcgtttgtcacgtcagcctgtttgtattccgctgtcgctccgagtgattcaagcgattggagctgctgcctctgattcgcgcttaatggggaacggccggtcagaaccagtgtcggctctttgacgttacgggcgatttctttcgcgaaaataaagccaaggcccccggctcctccggtaataaggtaaatgcctccgtcgttccaaggagtgcgtattttactgccggacacagccgtttctttgacatcagccctgtatcgaatgccgttttcatatttgatatggccgtcatcagcacatgttttattttctctgatgatgtctgtgattctgccgttttctgccggctctatttcaatcagctgggttttcagccttttatgttccaggccggctgtttttaacagacctgaaatccctgagagcagctgatgcttacctgttttagaaagaaccgcctggatgagtacgtctccttccgtttcttccttcagcagtttttgcagcgtctccaatatccgcccggtataatcacggaagcgcgctgccggtttctcatgcggggaggtcatttcaatgcattcggctcccgcagtttcaacggcttgtttcaatccgggttctgtgtcacaaagcatcacgatatgccgggcaaaaacaggttccgtttgagcggcagtttcagtgctttgggtccatacgggctcaagcataagcgtttccggggcttcttcttttttctcaggttctttttcagccgttctgaacgacaaacctttcagccttacgcaaaccttgccgttttcatcacaaatatcaagatcgcgtttttccacctgtccggctttatggtcttcagaaagtctggcgtatacccacatcccggcagtgcacgcgctgaatacttcgagctcctgaaccgcaaacggaagcatcagtttttcatcatttgttccggtcaatatgcttgatgcctgcaatgcagagtccattaagcccggatgcatgacatactgccgtaccgtgtccgcacaagccggatcaagcgacagtcggcccaatacgaaatcatcccctgtataaatcgctttgacaccccggaaagccgggccgtaatcaaaaccgattttgcggtacatatcgtacacttcgtctgcagaaaacggtgtctcggcggatcgtaatttcagcttttgcagatcaataaccggagcctctgcgtcaggacggactgatactgcaccttggctgtaaacggtcggctgatctgtttcaaggccgctgtaaatgtcaaagtgaacgtcatttgcagtatcaggaacgagacggatattgacatggatcggctcgtcttcaatggtgatcggccgcacccaaaccgtattcttaagcttgacgcttccctgtccggtcggcacttcagatgcctgttccattgcagcgcgcgccatttcaagatgcgccactcccggtaagatcggcacgccttgtacaacatggtccgcaaggtaaaattcttctccggtataggttgaagtgaatcgctgttcggcaaggtttgatgtatttctgtgcagaagcggatgaagcacgtcctgcgttccggcagaaacagcgcttgttctttcgtgctttccgatgcgttttgccgcccaatagcggtcttttgcaaacggatatgtcggcaggcttatgcgtttaggcggccggtctccgtacagcttcgcccaatcgacgttcagccctttcacccataattcgagcagcttcgcgtatttgccgcgtgccatccatttttcaacggcttcttgaatttcttcatcttccgtcagcatttgcagcgtgcctttgtctattcttcctctgtacaagtccgcgttcttatctccattgacaaactgcgacagtttttcctgcagttcttcagcggatccggcaataaccgccaggcgttcttccatggcgtcccttccgatttggagggtataagccatagaaacaaggccggattgaccgaaccgcttttctgaaagcacacgtttcagctgttcggcttgttctttcaggcgtttttcatttttggcggatagaacgaaaaggcatggatcgatgtgagaatgatctgcttccgctctttcttgcggaatgtattcttcgatgacgacgtgggcatttaccccgccgatgccgaatgagctgatgcccgcgcggcgcggctgctcgtttcctcgttcgtccgtctgcgtcttccattccatcgtttcccgcaccagataaaacgggctgtcttcaagctgaatgtacggatttaccgtctcacagtgaagacttttgactaatgttcgatgcttcatctgcagcaaaattttaatgatgcccgctgctcccgcggcaagggataaatggccgatatttgttttgactgagcctaagccgcaatagccggacgctttctcttttccgtctgcaaacgagctgaacgcttgtttcaggccgttaatttcaacgggatctccaagttctgttccggtgccgtgagcttcgacataagagactgttttaggatcaatgcccgcttttttgtatgcggctttaatgacttccgcctgttgtttcgggttaggcgttgtcaaagatgccgcacggccgccatgattcactgcgcttcctttaatgacgccgtaaatatggtctccatcggcctctgccgctgacagttttttcaggaaaaagagtccggccccttcaccatgggcaaaaccgtcagcttgatcggagaacgttttgcatcgtccttctttgctcagcgcgcccgctttatcaaagctgatatacacatccggaagaacaatcgtattgattcctccggctaaagccatgtcgcacgtcccttcttctattgaagaaacggcatggtgaatggcaacgagcgagcttgagcaggccgtatcaatcggttcgctcggcccgtgcagattgagcgtatagctgacacggttcggtccgacagacggacttgtattcgccgcggatgacccttcaatcgtcgcatcggcattggctaatagagaaccgtagccggtatttccagtcccgataaacacacctgtttttgtgcctgagagactctttgacgcgtatccggcatcttcaatcgctttccatgcgtacgtcagcaggagacgctgctgagggtccatttgctccgcttcccggggtgaaatcccgaaaaataacggatcaaattcagcaattccgtcaataaatccgccttggttgacatttgttttattaacttcctttgcgggatccccgtaatagtcccgccagtcccagcggtctttcggaatctcggtcatgcagtctttgccttccttcaggttttgccagtaagcatcaatgtcttcagccatcggaaaaattccgctgatgcctacgattgcaatcggctccgccttctgaccccgctgtactgtctgcggaagtgtctcaggcagagtgcggcggcgcttaacggccgggcgtgttttttgagtctcttttaccggttttgacgattgaaccgtttttgtattaaccgcaaaccgtccggcgaattcatcctcatattcactgattaaatgaacggcaaattcatgaatcgtcggatgatcaaagaaaatcgtcggcgttaatctaagccggtacgttttattcaactgattcgtaaactcggtcatcgagatagagtcaagcccgtattttgtcatttcttcatgtgcatcaattttgtcaagtttcacttttaacagtgaggctgtctgctgttttaagagatgcttgactttttcaagcaggctgtcagcgtcaatctcatgatgtacgccggactcagcttccggatgatcattctcttttcggaacagttttgctttcatgtttttcacgtctccttcaagaaccgtcacccggactgccccgctcatcaagccttgatataaagccttgatgccggcttctgtgctgagcggtgcgattcccgcctcttgcatcagtatatcttctgtctgctttcctgcctgcattccgccttctttccataacggccagctgacagaaagcgtctttccgtatctttgtcctgcggcttgtaaagaacggcggtacgcggcatacatctccataaagacgtttgcagacgcgtagtcagcctggccgacgcttccaagcacacctgataaggatgaaaagacaataaagacatctaatttctcatgctgtgacgcttcatcaagatacacaaggcccttcactttcggagcgagaacgtcttgatattcctctgccggcttcttcaccatgtagttgtcttttataatgccggcactgtgaacaattccgtccagcttgccgtgccgtttgcggatattgcggatgaatcggtatacttctgcttcatccgtgacatcagtttgctcgtagaagacagaagcgccggcagcacgtactgtttccagcagatcttgctgcttttctccgagagcggatcggccggttaatatgatgacggcgtcttttgtgcggtttgcgatctcttttgcaaagatcaggcctaaacctccggcacctccggtgatgagataaacgccttcgtctttccacggaatgtccggctccgcttgagaaatgtccacctcttcccaatcagcagcaaagcgcttgccgttttcatatttcacatggacgctttcggcatgcatatggttttcggacactttttccgctatgtcttcagcactttctttttcatcggcttctatcatttgacaaatcagcttggaatgttcaaggcatgcggttctgaaaaggccggtaatgcctgagaacacctgctgtaagcctgctgaacgcgtaacagcctgaagaagaattcggcccttcggcttgcctttcattatggttttaatatgatcaaacagctgacccgcataggaatgataccgctctgcaatagatgcggggcgctcgtccaaaataaagacgcttgcgtgttcaagcttggcttcaattgcttgtttaacggcttcatcgtactcacaaaggaagatgatatgctgttcatacgaaggcgcgtgctcctgcgccggtttctgctgctccttccagaccggctcagccagcaatgtatcagtacggctgacagggacgccggcacccgcgttttcttccatgatccgcgttgagaatcctctcatccgcacgcaaagcccgccgttattgtcatataaatcgatatcagctttttggatataatcgccggctttattgttcgcgctgaatgtgacgtacacccacatgtcagcagcacatggcttcagtacgtccagctcctctaaagcaaacggtaatgcggctttgaatggttccccgctttctgcaagcagcgctcttgttacgttctgcaaatattcggcggcctgaagcgcaccgtccatcatactcggatgaaggatataatcagcttttgtgtgagagacggattcaggaagcttcaatttagcaagcagccggtcttcgcctttgtatacaagctgcacacctttgtatccgggtccgtaatcagctccgatcattcctttataaaacgcttcagattcgattgttccctgcgtgcaccagcgcttcatctgctcaagatccgccgtttcttccggtccctttcggatgatttcagcgatgccctgattataaagaggagctgcttcaccgcttgaatcgttcccgccgtacattctgtattgaatctgcccgtcttcttcttcataaagtccgacatggacactgacagtctgctgatcggctatcaccgggcggacccacacgatattctttaagcgaaggcccaaagattcctctgataccccgccgatacttctctccgccgcggcccgtgccatctcaagggtaacggcggcaggcacgatcgccattcctttaatgatatgctcggcaataaaatactctttgcccgtgaattccgagctgaaccgctgctcctgcaaaactgatgtattctgatggatcagcgggtgcaaaagcttcgtatccgtttgcttcacagcttcttccggccagaagcgctcttcggcgaacggataggtcggcgcactgattcgttgcggtgcggaatcctgatacaataagccccaatcgacacgcaccccttctatccagagcgccgcgattgctttcagcttttcttcctgtgtctggcacgccgcaagcttttccatctcctgaggtgacgcttctttatttctcactttttcgccccgtaagatgttttgtttattaccattgatgaaatcctgcagctgacgcttcaaatcgtgacgatcgttactgataaagacggctctctcttccatcgcctcacgtccggtctggtacgtaaacgccagatcatgcaaggaaacatcggtttcggcttcattcagaaagtcggataaacaagatgcataggcagtcaggcgctgcttatttcttgctgacagcggaacgatataaggcggccggccgtcatttgagctgctgatcgttttgttttcatattgttcaaaaatggcgtgtgcgtttgttcctccgagcccgaatgagcttaacgctgcgcggtgcggcgtctctctctccggaagcggttttctcttgtccgctacataaaacggcgaaccgctgaatgtgatattcggattcggtgacgtgtaattaatggtaggcgccagctcccgatgatataaactcatcgcgaccttgatgcacccggcaaggcccgccgctgtatccaaatgtccgatattcgtttttacggagccgatcccgcaatactgctcctgatccgtgtaacgtttatacacttgctgcagcgcggacatttcaatcgggtcacccaatgtcgttcctgtgccgtgcgcttcgatataggaaacagtctccgggtgaacgttcgtgctgtctaaaacttgctggatgacgtcagtctgtccttttacactcggtgcgtaaaaaccgactttatccgctccgtcattgttcagaccgatgcctcttagcatagcgtaaatgtgatctccgtcctgaacggcttgtgacgcttttttcaggagaatgacggcagctccttctccgcccgccataccgtcggctgaagcgtcaaatgccttgacatgcccgtcgcttgaaaaattcaatcctgtttgatgtacatagccgatgcttgtcgcagcatgcagagttgctccgccgacgagcgcgtattccgattctccgctcgttatgctttgataggctgaataaagaccgactaatgatgacgagcaatttgaatgaacgaaatagcttggcccttttaatccgagcttatgggaaaccatcgtcggaatcgtgccgctctgcgccaacacccatgacacatagccgtcaggagattcatggccttctgtcgttttttccggcaaaagcgaccgatacgaattattgcttgccgacatataaacgcttgtcttcggaatctctttggatacatatcccgcgtcctcgacggctttccaagaatgaagcagcaaaagccgaagctgaggatccataaattctgcgtctttcggagaaatgtgaaagaattcagggtcaaagagatcttttccttctatcgtcgataatgccggcacataatcgggattttcgatcaaatcttccggtacgcctgcttcccgaagttcttcttccgagtagaaacggacgctttcttttccttctcttaactgcttccagaactcatgatgatttttcgcgccggggaattgacaggaaatccccactatcgctacgctgtcctcaaagtaagacggcaccccgttttgagccgtttgttctctttctctctcatcttgggcgggcgcctctctctcagcggcctgttttgtttcaacaataaatcggctgatcgcctgaatggtagagtgttcgaataaatccgtgacggtaaaatcacattccagctcctgtttaatgcgttctgccgcggcgacagccagcagcgagtcgcctcccacatcgaaaaagccgtcttcggttttgatccccgcggtattcagcaggtcttcccatatttcagtcaccttcgcttccgcctctgataacggcagactgcccgtcttttcagaccggtgaacgatcaccttgcgcttttccaggtctttgcggttcactttgccgctcggtgttaacggcagcgcatccagtcggataaaatgggcaggcaccatataatccggcaggcctgataaaagatgtttgcggagcgctttttcatctgccgcatgaccggagcgggccgtataataagcggtcagctttttatgtccgttcttttcctgaacgacaaccgcctgatcaaggatatccggatgttcgctcaattttgcttcaatcgctcccaattcgatgcggaagccgcggatttttacttgactgtcaatacgtccggcatattctatatttccgtcaggcagccatctggccaaatcgcctgttttgtaaagtttttctccttcactaaacggattatcaataaatgatgccgccgtcagctcaggctgattgtaatagcctctggccagaccggcgccggccacgcaaagctcgccggccacaccgtccgggacggggctgagcttttcatcgacgatatagagccgcgtgttttggatcggttttccgatcggcgtatttctgcttgtgatttccttatcgccgcagctgtagtaagcggcataaatggatgtttccgtcgggccgtatatgttttcaattctggcgtttttgaagatggatactgactttttgaccaagtctttcggaaacgcctctccggccaccatcacatatttcacaggaccttcctctgtaaatgacgtatgccgctttaccgtttccagaaatacattaaacacagcaggagcaaaattcagatgcgtcacctggtgagtttggatgtattccatgcaaagctgcggatttttttctgcaccgggcggcaaaatgacaagccgtccgtttccgataaaccagccgaataattcagaaatcgaaacgtcaaacacgtagttcgtttttaacagataggcatcctcctgcgcgaccggatactccgcttccaaaaactgcagtgtgttcatgatggccctgtgctcaaccatgacgcctttcggttttcccgtgcttccggacgtatataggatataagcgaggtgatgcggttttgaacgctgcgccaattttgccccgccggcagggcgtccgctgttttcgatctctaccgtgctcacaccgccgatggttaaccgttcaatcatgccgcgtgtttttgcttgcgttaagacgattgaaacgccgctgtcaagcaagacgtgtgacatccgttcctttggaaaagccgggtccagcggcacatacgcacctcccgcttttaaaatggcgaggatgccgatgaccatctcaaaagaacgctccgtacaaatgccgaccgggcattccggtgtgacccccttttcttgcagatacacagcgagcgccgtgcttcgttcatctaattcgcgatatgtaaggctgttttcaccgaatgtgacggcttctctttcagggtgccgcccggctttttccgcaaacacttcatgaatacagcgctcattcggctgatgggatgtgcggcttttttcccgttcctgattctgattgagcaggccggagcatgcttcaaaagcgatctccgggtcagaaagcactttttctgccagtttcatataatgctccgccatccgttcgatagtagtggggctgtagacatccggattgtacagaaattgcaggactgtttctttttcttttttatagacttcaagcgcaagctcaaattcgccttcctgatgaatgtcttctatcatttcaatcccgagtgattgatattgttcggccagcttttccgctccttctgtccggaagaagttttgatagaaaaacgcggtttgaaaaacaggtgaaacagcaggcgaacgttctgtcttcaattcttttacaagcgccggaaacggatacgcggcatggtttaacccttctgcaagtgtcatctgaagctctttcaaaaaggccgtaaaggtttttgcgcccgtctccctgcttctgaccgcgatcatattaataaagtatccgatcatagactcaaattgagcctcagagcgccccattgtcggcatgccgacgatgatatcttcctgattcgtatattgatagagcaggcctttgaaaatagcgagatacacaaccgattcattgacattatttttttgggcgcaaactttaatctgccggttcagttcatcaggaagcaagcgctgatacgcctgccccctgcaagtttgaaccgatgatctcgggtaatccgacggaagctctagcaccggcagcggtccttccagctgctctttccaataagagagatgcgtttttcccgcttcactttccagcagttctttttcccagttcacaaagtcatgataatctgcggcctgccgaagcatttcaggttctttgccttcgcctgcttttacataggcgtccagcagcgccgacataaacgtcataagagacacgccgtcaaaaatgatatgatgaatggtgattaacacgatcgattcccgcttcgccctccggaacacttgaacgcgcaggagcggaccggtttcaaacgcaaacggttcttttgccttttctttaataaacgttagagcgtcacgcccgcttagttcagaaagatccatttcttcaatcggaaaatgcatctccgaatcttcaatctgatacggaaggccgttttcctcttttatcacactggtcaaaatagggtgctggcgcttcacaaacaaaagggcgtttttgaatgtctcgatatccagcttttgaaatcgaaagcataacggaatgttatatgcgctcatctccggaaacattttctgaagcatccacaaacctttctggccttctgaaagcggacgttttgcagttgtccgcttgaaagcctgaagctcttgttctacctcagcgatggtgagcgttcctgatctgtaggcatcgagaagttctttatgattcataagtcttactcccttctatgatgtcttgcactcttttaaaatccaatgtcccctcagagacctgtttcatcatggcgatgatctcctgatccgtatactccttgctttccggagcagcgtcttctgtttcggtttcttccgttctgtaaaacgtttcgatcgtttctttgtgttctgtcaggtagtagttcataacgtcccctagcgtggcatagctgtaaaataacgccggagtgacttcaatgccgtaatggcgcgacaaaagagcggcaaatttggctaaatagatggaatcaaatccgaattccgcccagtttttatgcaggacgagcttatctttggatattttcagcagactgtgtatcagctctttcaaatccgcttcgagccgtttttccgtgctttctgccgggatgcggctgctcacggtttccggcaaagcttccggttttgatgactcatctttccggatacctaaaaatcgttcggcgcggcttcttttgcctgcaatgacgagacactgggtgttttcttgagaaatgatgcgctcaaacagctcaatgccttcatctgtttctaacaggcgctggccgcttgatttcaggtacatgcctgtcgtctcttcaccgccgacggccattccgccgtttttccagacgggccagtttatgacaaaagcgtttccgctttctgattgttcgtttttatagtgggcgtacgccatttggaacctgttcgccactgcgtaatcacagcagccgaaatcccctaaaacagccgatgtggatgaaaagtagcagatgaaatccggcgtttcatttttcagccactcgtcaagaagcaggcttccgtttattttcggttcaagcgtaccgcggaaattcccgatttcattttcaaagacggatgttctgctttcgatgcccgccgcatgaatgacgccgtgaatggctccgaatcgttctttcgcgcgcttaatgcagtcgcccattccgatcggatcacaaacatcggcttcggcgtaaagaacacccgccccgagattttccagctctttcattttttctttcttctcttcattgatcggcgaccgccccgtgagaatgacatttgcctgataattccgggcgaggtggcgggcaaataagtagccgagccctcctaatccgcctgtaatgagataggttcctccggttctgatcctgctgttttcttccgttaatccggttggttcagtgtgatagacataccgtttcccctcttccaagaaaacggtatggtctgtttcagccttcagctcgtccaaaatggttcccatccagtctgtcatggccgcgccggcttttctgaagtggccggtaatgcttgttttcgggagaacaatgccgagcgaacgctcaaagccgatccatgattccaagtagcacttttccagaccggatgcatattcacccgccaataacaatttttccggcagcagaccggtctcggccattgccttgagaatatagacgatacatgaataatcttctatgcagcttttatcttcgagcgcccataaatacaaaatggcagaaacttcaccgtactctttttgaatgtccgcaaaagcgttcacatatgattgcggatcttcccgcaccacctggcagcggccggaggataaagcctcataccggtcgccctgagcgataaatataacgtcagcttcactgtcgtacgatctgatcgccgagacggcttcctgctgcttcttctgatcagataagaaagaaatcaccgtcttgattttcttttctccaacagccggcaaagcctgttctttaagaacttctcggaaagccatcacttcaaactgttctgccggatcattttcatcggccgctgctttaacgggcgctgccttactttgagcaggctgctgatgccagaagcgctctttcgcaaacggataagcaggcaggctgatgcgggccggaagacggtctccgtataatttcgcccaattgatatctaatccttttacccaaagctcaagcagcttagaatatttccgtttgctgatccaagcgtctaagattgcttccatatcatcatccgccgcaaatacggcaagcatccgtttgttttcttccgtaccgtcgcggtgcatttcggcggtgtcttttccggagataaatccagtcagtttttcttcaagttcatgaagtgaatgaacgataaagccgagacgctcttccatcggcacacggcccgtctgaagagtataggctatactcataagatcactgctgctgtatcgtttttcacggatggcggctgtaagctgttttgctttttcagtgagccgttcgctgtttttcgcggacaggacgataatagcgggctgatcacccggcgattcaacaggctctttatctgcaatatattcttctatgacgaggtgggcatttgctcctcctgcgccgaagctgcttaatccggcccttctcggaatctctttgccgccgatgacgggacgtttccactcgccgagttcctgctgaacgacaaacggtgtatatgcgaactcaatattcgggttcagctgcccggcatgcagggacggcgcaatttggcggtctttcagctggaacaatatttttgtcagaccggcgatgcccgcggcgctttcacaatggccgatattggattttgcggagccgatggcgcaaaactgtttatctgttgtatcctcttcaaatgctttcgttaatccggcgatttcaatcgggtcccctaatgcggtccccgtgccgtgggcttcaatataactgacggtgcgcgccgggacgtttgccctttggaaagcctcttttattaaggcggcctgcgcgttcgggttcggaacggtgtacccgttcgttttgcccccgctgttaatggtgcttcctttaatcacaccgtaaatgtgatcgttgtcggcaatcgcttggtctaacggctttaacacgaccgcgcccactccttctccgtctacaaaaccgtccgcgcggtctccgaacgatttgcatgtgtcgcttgcagaaagcatgttcatgactgacagattcatataatggatcgggtcggttacgatatttacgccgccggcaatcgcgcattcgcttgaaccgctgtataggctctcaagcgccagatgaatggccgtcaaagaagaagaacaggctgtgtcaaccgcaatgctcggcccttggaaatcaaaaaggtaagacaccctgttggcaatggaccagtagccgtagcctgtcgggtagtttttgttcatcgctccggcaaaaacgccgatttttctgctttggcacaggttgtcaggcgtatagccggcatcctcgatactcgcatacgccgtttctaaaaataatcgctcctgcgggtccatgcgctccgcttccaaaggagaaatctgaaagaacagcggatcaaacttgtccatatcttcaatgaatccgccccatttcgtataaatagagccctctttacctttttctacatcatagtaatcctgccagttccagcgttcctgcgggatttcttctatgcagttttttccttttttaatgttagcccaaagctcagccgctgtttttgcctgcgggtagcgtcctgaaacgccgatgatggccacgtcgcgaaccgaactttgccggacggcctcttttgctgcccgtttttctctccgccgccagtcagtgcgaagcggcttagccggctgtacagcctgcggttcggatgccgcctctggttcttcatgaacaggcgcttgtcccgtcagtttgatcatcgcgtctttttttgttttgattaagtggccgacgagagcctcgatcgtctgatattcaaaaaataaggtgctgctgacttggtctaacacatttcgtaacgcatttgtcagctgtacgacgacgatagaatcaattccgtatttttcaagcggcgctttcggatcaatttgagccggcggaatttttaatgtttctccgattaacgtttttaagtactcggtgcttttttctgttaaagctgtatcgcttttttcggccgttgtttgcggctgaagttccggcgcttgtgctgcttttggcagtgcggccggtgttacgcctcctgctttaagcgttttttggcggacaatgccgttgctttttgccgctacaatctgatggcttaaatcatgtgcagcttctgccgggaaatagacagaatgccagccttcgctttctaacacgtgcttccagctttttggatacaagcccgggcatcccggaatacgaaggtcagaatcttcatgcagccaccagccttcaagcaacccgaaagtaatatgcgggaacaggctgtttcccgccatttcatttaagagcagcaggccgttgtcttttaaaacggctttggcgtttctcagcgtctggcggatgtctttcgtcgcgtggagcacgttggccgcaacgacgatgtcgtatgcgccaggctctatgtcctgaccggaaagcggcgcttccgcgttaaaaagtttataagtcagataaggattctgtttgccgtattctgtttccgcatgcacgagaaaagctttcgatacatcggtgtaacagtattcttttatatggttttgatacggctttagcttttcaaatatgcctgcgcttgtgccgcctgtgcccgctccgatttccagtatgcggatggcggtttttgagtttttactgatggtttctttcacataggacgttaatgtatctgacagggcgccgttaaagtaatccgcgacttgattatgcttataaattccttcaacaagttccattgaagagtgcgggaacatgatatctgtggccggcacgtcttcgcgcagaatgtccggcagtgctttaagcatcgtctcggctaaaacagtcattgcttttgtatcagtattattgagccattccgctttttcctgctcccattttcgccatagcgaggcggttgcgttttcagcgcgggctgacagtgtaaatgaatcggcattcccttccagatagccgtgttccagaaggaaggtgatcgtttgatcgagccattttttaaaatattcgtgttcaggctcatacgctttaaggctttgcggcgtcagcaagtccgcttctttaagctgggcgatcaaaagctgatacagaaaatcatcaagctcctgatgttcagcctctcttacaagacgcgcgccgggcggagcggccttcggctgttgtccggttacaagcggatgaggcggataaacggaaatcgtttctcgttcattcatcccctctactgcgaccggttttgtcgtatgaatgaaggctgcttgatcaaccggtatcgtcataagtgtttcaagcgcctccatcgcagcgtccggttcgatcagtcccaatccgatctgatccatcagctgaataaaattgccgtcttcagccgcttcgctgttgccccagtagccccaattcatgactttgaccgggcagttccatttctgatcaagttccttcgcaaatgcgtcactgaaggcgcatcctgcggcataatggctttgtttcacattatggataaatgccacaagcgaggagaagaagagcgcaaagtcaagcggctcccgtccgaatacctccgccatggacacacttacgtcggcttttgctctcagcaccgatttgaactcttctgtcttcatattatttaagctttgctcagacagatccattgccgagtgaataacgccgttaatttttgtgtgacgctcttttatgagctgataagcccgctctaaggaaacactgtcagcggcatcggcggaaatatattcaggcgccggaccgaatgcgctgagccggtcgagtttcgcctgtatggatttattcagcgtgcttcttccgatccaaatgacgcgtgctttgtagcggcggatcatatattcgctccatgcctcgccgagatacccggcgcctccgattacggcataaaccccgcctgtttggtatagcgtgccgtttttcggcatattgtcaagcgggatcagctgccgctcaaacagctgctgattgcggtatgcccaaacttggccgtttttcccggcagaaagagaaagcgcctctccgatcggccagataccgtccgtttctgtgtcaatcatgcggacattccaatgcggatattctttcgccatcgtcccggcaaggccgctgactgcggcttgtgacggatcggcgctgtcctgatccgaaaacggctgagcatttgctgtgacaaagcaccagtccaggtgtctttctccgtaccctgaggcaagcaatgctttcatcagcttaaacacatgaaaaacgttgcgctcctgttccttaaggctgtcagcaccctcagcctcaggcgcgagccaaataatttgctccagctctttatgcccttcaagcatgtgcgtaagagatgcgatatcatccgtacctctgattggataatatgaagcgtttggcagatgctcttttatacgtgaatgctgtctgtcagttcctccgaaaactgcggtctgcttattcaccgtattcactttcttcgttttttcaagtgaaacgggctcccaagccggaatcatcatcgtgtgtccgacaggcgcctccaaggtttcgcctcccgctgtttgggttgtgtcaagcgcccggacagacgcgcctttcatccgtacataaacggtaccggcatcatcacacatatcaatgtcaaattttcttacggtgtcatccgctttgcttccttcgctgtaccggatatatgaccagacatgctcaggacacttcccgaacacctccacttcctgcatcgcaaacggcaaagaaagctcgcggcttcccgcatcgtcatgaatcgaacggacaagcaaacccacggaggcgtgaaaagcggcgtccatcatactcgggtgaagcgcgtactgttctttcgtgtcatgtacggcagccgggagtgaaatacgggccagcaatcggtcttcaccgatcagcaattgctgtacgcccctgtatgcttctccataatccaagccgatcttttcaaaagctccgtagcattcatccgcagtcactatccctaaattgcaggaagccttgacagactcaatatctaactgagcgctgcccggtgcggtaatgactgcttcaccttggctgtgaatgaccagatcttcgccgttttcttctgcctcactgtatatttcataggtaatctcaccgttatcctctggataaagggcaatatgtatttccttcggtttgttttcaacaatgaccggccggacccaaacgatctgtctgagtgtgacgctatggcctttgtccgtcacggccgcggcctttttcactgcttccccggccatttccagataggcgacgcccggcagaattttttgtccgttgacgacatggtcagaaaggaaaaattcatctcccgtaaaaagagaagtgaagcgctgctgtgaaaaatctgacgtattttcttgtaaaagcggatgcagtacagtgtctgacagggttttatcctgtttttcccgctgcggaatccaatagcgctcttttgcaaacggatacgtcggaacgcttgttttgcgcggtttatccggaccgtacagcttattccaatccactgttttcccttctgcccataactcggcaagccgcagcggatcatccgtttccggagcgttttcgctcagttccggcatctcggcttgtccgcgccaaaatcccgggatattttcgtttccttttacgaaatcgttcagttttcccttcaattcgcgggtgtcatttgcaaggaagacagctctctcctccattgcttcacgccctgtctgaagggtgtaggccagttcagacagcgccgtcttttcggaaagtgtccgggctattttttccgcataggccagcagcctgtctttatttcttgcggacagcaggaagattttggctgcttctttctcaggcgcaggcgctttttgttcaggctgaatgtattcttctaaaatgatatgagcattcgaacctgatgccccgaaggaactgagtccggcccggcgcggataatgcgtgacttttccgttttcttcggctgccggctgcttccacggagcagtctgctgctgtacgtaaaaaggcgatttctcaaatttcacgtatggatttaattcaccggaatgcagagatttgacaagcgttttgtaatgaagctgcagcgccgcttttgttaagccgctgatgcccgccgcagattctgcatggccgatatttgatttgactgaaccgatggaacaaaattgctgatcctgcgtcccttcgctgaacgcttttgacaggccttcaatttcaatcgggtctcctaacgaagtgcctgttccatgggcttccacatagctgacagtccgcgggctgatgcctgcttttttcagacatgccttaataacttctgcctgtgcagcagggctcgggacggtaattccgcttacttttccgacatggttaacggcacttcctttaataaccgcgtaaatccggtcgccgtcttgttcggctttttccagcggcttgagtaatacggcacccactccttctccggaaacgtagccgtcaccgccctcgccgaatgtacggcagcggccgtcactcgagtgcatgccgacgcttccgtagctgagatatttcgccggatgcagcgacaagttcacccctcccgcaagcgcggcctcacattcgccgcggcggatgctttcaatggccaggtgaacggcggtcaaagaagaagaacaaacggtatccaccgcgaggctcggcccgtggaagtcacaataataggacactctgttggcaatctgcgcataattcagtgaaaccggaaaaggatcagtctccgataattgttctgcgccgattaaggaataatctttatgcatgacccctgcaaaaacgccgacaggacgctgtttattttttttatttccaagcgtttcaggcgtatagcccgcatcttcaatcgtctcccagcaggtttgtaaaaacaggcgttcctgcgggtccatcatttccgcctcacgcggtgagattctgaaaaactgcggatcgaagcaatcggcatcgtcgatgaaaccgccccattttgatactttttttccagatggtgacgttacgtttttatatgttttccaatcccagcgggacttcggaacctcagtgatgcaatccgtgcctgccttaaggttttcccaaaactcctccacatttttcgctttcggataccggcccgccattccgataatcgcaatgtctccggtgttttcatgttggtttggcacacttggtgtttcagtttcaagtactgatggttcggctgcatgatcttccctttcaaatgaaacggtctttttcaaataggcagccagttcttttatatttgtatattcaaagagaagagtgggcgcgaggggcacacccgcctttttactgatatcctgaacaatctcaagcaaagaagatgaatccagcccgagctcgtagtaaccggcaagaatgtcaagcggctcccaaggctgccccagcttttcagccaaaagcttctttaaaaacagaatgatgtctttttcatctgcgctttccggctcttttgcatcctgtttatcttgtccggctgtattctcgtcttcttcgaaccgcaccgcttttcccgtaatgtttttaagctccgcgaccttctgtccggatcggctgaagtactcgattgtcatagtggtgagttctttttcctgacggacgccggaagctgcgatacgcgccgtgcactctgattgaagcctgtcggcggccgtgaatgattcataatataaaggcaggtggagccggtttgtttcagaaagcaaaccgctcgccccgattccgctcgcatccaaaagggccgggtgaaataaaaagaaatcctttccctcttcgcaagatagctcagccagcatgccgtcttctgtttcgtataatcgtccgtttgatttcatcatgccggaatgaaccaaatcatgatccaggcagcggttatacatctcatcaagatccagagatcggactgactgcttcacatcgccgaaatcaagggtttcatcaaatgtgacagcggctcttttcaccatttcagccgtcgcatactgtatattgtctgacagctcgtcaccttgctgtttctgcccggaaagggagatgaaccattttccatctccgctttcagaacattgaatggtcagaatgattgcagccgtttcactgacggttaaaggctgataaatcgtgacgtgcttcaattcgagctcattgtataaataaccgtgttcctgaaaaacctgataaatcaagtcgatataagcaagaccgggcaataccgcttcaccaaagaccatatggcctttcatgatagggtgatccagtgagatattgattttttccgatatcattccttcccactcctctctcaattaaatgctttccagaacatttttttcgcaggaagctcttgtttcacctgtacggcagattcttttaccagagccttccgtcttaaagacggtaccggcagcggctttctttttaatcgggtatctttttcttcccaagcttccagaatgatgtgggcgttcgttccgccgtcggcaaagcagttgatggctgcgcacggtttggctgcatcccattcgcccgctgtcttttgaaaataaaaatctgtctttgttatatcaaaatgcggcatcggttcatctcctgagagaaatggaaccgtttgtctatgtttcagcattaatacgactttaatgaagcttgcgatcccttctgcgcaaagcggatgcccgatgttcggcttgattgacccaattccgagcgggacatgctgatcagagcggtatacggattgaatcgccttcagctcaagtaaatcagtcaccgcagaacccgatccgttcgcttcgatataagtgatgtcttccggctttttgccgctttttaaaagcgcgctttgcatgacgtctttttgcgcctgcatattaggggctgacggtcctgccgttctgccgtcattgttcatagcggcggccttaatgactgcgtgtatcgtgtcaccgtctttttgcgcctggcttaccgtttttaacagcaccatgccgacgccttctccgaggacaactccgcctgaccgcttgtcaaatacatgaaaggacggtttctcgtttaacagcccgcgctcttggaacatccggtgcgccgcatccgtgttcagcaggctgacgccgccgactaccgctgctttaatatcgccgcttctcagtgcctgaacggccatattcattcctgtcaaagctgatgaacaagccgtatcaagcacgatgctcggcccgcgcagatcaaaaaattgcgaaacgtttgccgctaaatagttctgcccgcccgcaacgatcggattgcgcgtattcgcaagactttcaggatcaggctgatgctggctgcggcctccgatgtacacaccggcctccatgcccttgatttcttcacgggtatagccggcatggcaccaaagccttaagctctcttccaacaccgccaatgcctggggatccatcgctttcgcatcgttttccggaatgaaaaagaattcggaatcaaagtgattcatactttcaatcaatcctgcaacatattgatttgcatatccgaatcgctcctttggcactgaaccgattgcagaccttccgcatctcagcaaatcccaatattgttctaatgattcagctcccggaaagcggcagctcattccgacaacggcaatgtcttcactttcggcaaaacgcttttgttcagtgtgaaccgtttgtacggcatcagaaaccgcgggttctgtattagattccttcctttctgtaaacagcggctgcccgtttgatacgagccattcggcaaacgcgtcaatcgtcggatgttcatataaaacagacggatctaagtcctctttgagagcttgattcatttgctgcaacagctgggctaaaatgatcgaatcaactccgtaatcctgaaacggttcgtctgtttccagttcatccggagcgattttcagttcatccgaaaacaatttcacaagccactccttcgtatcaagaagaaggtctgagcctgattgttttacctcgatttggccgtttgattcggcttcagcctctttttgctttttcttttgacagagcagcttgtcagggtgccattcgcttcgatcaacgatggccggcagaacggccgggcggatgttttcagacaaaatgcggtcaagcaagtcaagcccttctgcattagtcagtcctaacagcccggtttgcttcaggctttctgtgcggacttcacccaatccggtttccttccaattcggccattgaatgctgaccatcgggtattgatgctgatgagccgaagcgaaataatccatatacccatttgccatcgcataatccgactgtcccgccgcaagcgccggaacgaccgcagatactgatgaaaataagacaaagaattgtaaaggatcatttgtaaaaaggctgcttaatgtttgaagcccggcgactttcggctcaagcacttcttgtatgtcatccgcagtctttctgataaacgccgggtttactgaattaacagatcccgcacagtgaatgacgccgccgatcggccccatcgtgcgccggatcgtttcaatttccgctgctacggcaacacggtcagacaatttcatactgagcactgccacttgcacgccttttgcttcgagctcttcaatcgcccgaattttctcttttatccgtgtatgaacggctgatcgttcatgacgtggaggaatcggctccctgcctgtcagcactacttttttcacgccgtgtttttctatgaaatggcgggcgcataaaagaccgagtcctctcgtccctccggtaatgaaaagcacatggtcttcagggaacgttacgggcttatgttctgatggctcccgttttggaatctccctgaataaagcacggtatctctgtccgtttcggcggcagacttccggttctgtgctgtccgccgaatattcatctgcaatctgtttggcaagcgtctgctgatccgtatcagtatcggcgtccatgtgtcttgaagtcacgttttgatactcattttgcagcattctgtacaggccgcttttttctgctcctgcaaggtgaatcgttttctgctgaaacggctccaagcctttagttacatatagcagcatcagcggccgcgcttgccggcggcttgtatcaatcagaatctggagacggctgagcccttctgaagaaaggtcttcgtcaccgcatcccgtcagatcgatcgcgccatctatgtgattccaatcggcctctccggtatcggcggaatcaatcgggagaatgaaagagtcagcgaaatacttcgcagtctcttcggcaagccaccttgtcctactgtcagccagaatcatgaccttcttgccgatgttgccgccggccgactcaatctcacacggaacccactgcttttctaaaagcacagcctcgcgccggtcttccgtactctgcgatacggctttcggctcaggcagccagtacggctcctttgcaaacgggtaagccggcagactgattctgcggggtttttcgtcctgatagagcttgttccagtccacctgaagccctttggcccacaattccgctaaattgccgtattttttcttatcgaaccatgatttgacaagcagcttcagatcatcgtccgtttcaaatgctttgatttctttttttgccgttttgacgtgagcttcatatatcccttcacccattttgccgtttacaaaatcggttaaacggctgatcagctcttctctcgaattcgctgtaaccgcaagacggtaatccattggatcacgtccggtttgaagtgtatacgccatatctgaaagatggatatcctgattggcctttgcaaaatcgatcatcgactcggcataggcttttacctgcggcgcttttttggccgacagcacaaaaatgtttgtctcatcaggcttacggcggcccctgtctttcggctgatactcttcaatgacgagatgagcgtttgtgccgctgtagccgaatgagctgacacaggcccgccgcggtgttccgccggattcccaaggtttcacttcagtattgacaaataaaggcgagtcatcgaaatcaaaatgttcattcggcgtgctgaaatgaagagtcggcacgagcttctgatgcttcatcgacagcagaactttctgcacacttgctacgcctgccgccgcagaggtatgtccgatatttgatttaaccgaaccgatggcgcaaaattgtttgcggtccgttttttccttgaatacagaagataaagcttctaattcaatcggatccccctgctttgtgccggtgccgtgcatttccgcataggtgatgctctcagggtggatgttgtgcgcttcatacacttgacgctctaaatccatttggcttttcgcgctcggcgcggtgatgccgtttgtttttccgtcctggttaattccggacccgataatgactccgtaaatatggtcttgatcggcttccgcatctttcagccgcttcagcacgagcgcccccgcgccctcaccaggcacaaatccgttcgcactgttatcaaatgctttacattggccgtcaggagacagcattcctgcttcacacatgctgatgtatgattcaggcgttagatacaaggtcacaccgccgacaagcgccaggtcaatttcatgattcaagagcgcctgacgcgccaaatgagttccgacaagagaagatgaacatgccgtatcgatcggaatggccggtcctttcaaattgagataatacggaaggcgggccgccgcgatgctgaaactgttgccagtggcgcttcctcctgtctgatgtttgtttaacatcatgccgtattcattgttcataatccccaagtaaacgccgcaatttttcccgtttaattcttttgagctgtagcccgcatcttcaaaggctttaaagccttcctgtaaaaatattcggtgctgcgggtccatcagttccgcttcagacggagaaatattaaagaacagcggatcaaattcttcaataccgtcaagcataccgattgatctgcagtacactttgcctttcttatttaaggccggatcatagtacttgtttacatcccagcgggaaagcgggatatcgcgaatggcgtttttcgcacggactaaattgtcccaatacgtcttaagatccggcgcgtccgggtatttgcccgacatgccgacgatggcgattgcgtccgccgtctcgtctttaggctcccgtttggcccgcaccggttcaggttccttttgaaccgtcaatctgtccggcccggcagatggtttctcctgcggggcagattcctgcttcagcggctttggacgcacaggaaccgcctctttttttctgccgcggacagacggctgcgtacgcagaaaatcggcgaattgacggattgtcgggtaatcatacactttcgttacgttacagtccgttccgtaccgtttattgacggcctttatccattcaagaccggttatcgaatccatgcccaaatcaataaaagcctcatcaatatctacatcatgctgttccatgtacaatacatcagccagtgcttttgataacgctgcatgcaccgcttcaatcggttcaatcggttcttccggctcggcggaagctgccgtttcagacatcgcctccaaaatatccgccttggcctgtaacaccggctgcttttgagcggttacaggctgcagcattatgttggacggttttttcaccgcctctgttttctgcggttcggtttcctcaaagttcggttctgttccgagctcttgctgcaagaaggccgcaaactggcggattgtcggataatcatatactttcgtcaccgtaagggacgtgccgtacgttttattgacggcctttatccattcaagaccggttattgaatccataccgatatcaataaatgtgtcgtctgcgtcgatatcgtcagcatccatatataaaacgtccgccaaactttccgttaatacggcacttattttttcagcggaaaccgccggacggtaagcggacaatacggttcttttcggttccgtgccgctcaaaggctgcaacataatgtttgtcggtttttctttcgcagtctcctcgtgaagaggcgccgcttcaatgaccggttccgggacggccgccgccacaaccggcgccggctgtgtttctgcctgtcttttgacaggtaaatctgctgatgtgtcgatccaataacggtcctttgcaaacggataagccgggagactgatttttcgcggtctgcccatttgatacagcacatcccaattcagcggaagacccttcacccaaagctctaataccttcgcggctttgcctttttcaagccatgcctcaatggttttttccatatcctcatcagccgcaaagagcgccatcgtttctttattctgtttgacttgtccgcggtagagctggtcaattgaatccttgccgctcgtaaattcgtcaagcttttcttcaagctcgcgcaaattgctgacaatcaggccgaggcgctcttccatcgcttcacgtccgatttgaagcgtataagcgatccggctcagatccgcttcccggtaacgcccgctccgcagtgcatcaagaagccgtttcgcgcgtttttgaagccgattctcatttttcgcggaaaggacgatcattgacggatgaggtgcggcaaaagccgtctccttatcctcatcagcggcatattcttcgatgacaatatgagcgttgacgccgccggctccgaaagaggatagccctgcggttctcggcagttctttatttactccgttctcgttgatgaccggtcgtttccactcttcaagcgtctgctgcactttaaacggcgtactgagaaaatcaatattcggattaagcgtccgggaatgcagggacggtgcaagctttctgtgtttcatttgcagaagcaccttcgtcaggcccgcgatgcccgccgcgctttcacaatgcccgatattggatttcgctgagccgatggcacaaaattgtttatcttgtgtctgttctgaaaagactttagtcagacccgtgatttcaatcggatcgccgagtgaggttccggtgccgtgggcttcgatgtagctgaccgccctcggatcggttcctgcatcttgtaacgcctgtttgatcactgcggcttgggcgttcggattcgggacggaatacccgtttgtttttccatcatggttcacggccgttcctttgatcagaccgtaaatatgatcaccgtccgctttcgctttagaaagcggcttaaggagtacagcgcccactccttcaccgggcacataaccgtctccgccttctccgaaactttcacatctgcctttactagataaaaatctgttctggccgagcatcaaatatttattcggatggatggatacattgacgcccccggcaaatgctgcttcgcattccccgttccgcaagctttggcatgccagatgaatggctgttaaagaagaagagcacatcgtgtcaagagccatgctcgggccgttaaaaccgaatacataggaagccctgttcgcaattgatgacggatttccagtcagcgcaagcgattttccgcgcgcctgttcttcggctccgtaaagctgatattcttcatacatgacgccgacgtaaacaccgacattggcacccagcaagtcacccgattttccggtcagctttccgcgcgtataaccggcatcctccatcgtttcgtagacacattgcagaaataaccgctcctgcgggtccatcaattttgcatcccggggcgaaattgagaagaattgcggatcaaatttgtccacgtctttcaaaaatcctccccattttccgtacgtcttgccttctttatctttatcagcgtcgtaataaagactgtgatcccagcgatcgcttggaatttcggttatgcagtcaacgccttcactcaagttcttccaaaattcctgaagattttcggcctgcggataccggcctgacagaccgataatcgcgatatcctcacgctccggcagctgctgatttttccgcgtgtctgtgcggactgccgcaaagccttttttgccttcaccccgattggaaacaggttttacctctgttttctcagggagagacggtttggctgcagggatttcttccgttttcatcccggtcaagtccagcagcgtgtcgcggtgtgctttcataaaatattgcgccagcgattcgatattctgatattcgaaaaacaatgtttttgataatgaaccgaagctcttttccagccggcccgtcaaatgcataatcataatagaatcaattccgtaatcttccataggcgccttggcgtcaattttgccgaccggaagcttggttacttccgaaagcacatgtttcaagaaatgctctgttttttctgcaagcatattctctccgcctgatgaaaggccagccggcgcttcggtatcgcttcctgtgtcctgctgatcatccgctgatcttttcagaaacgcccggatttttgcggcgtagccttccgtcaccatgacttgagatgtttttgccgcccatccgcggtacaaagcttgaatgccgttttctgttttcatagggaccatgccgctttcttttgtcagcattgcctccgtttcggcatcaaccgtcatgccgccgtccttccagagcggccagcagattgaaagggtgtgtccatagcgttcatttcgggctttttgccggtttcttttttcactgaaggcattcataaacgcattggccatcgcataatccgcttggcccgcgcttccggcgcttcccgctccagaagagaaaagaatcagaaaatcaagctcaatgtccttaaccgcttcgtcaagatggaccagtccggcgactttcggcgccagcacatcacgaatttcatctttgtgctttttcagaatatagttatcttttatcgtcccggcgctgtgaatgataccgtttaagccgccgtactgccgacagatgtccgctgtgagtgatcgaacttcttgtttatcagtcatgtccgtttgtttgtacacggcttgcgcaccaagatcggacagctcttgaagctgggcttttttacggttatccagcacagaacgtcccgttaaaataagaacggcgttttttgcatgccgagcgatttctttggcgaacaaaaatccgagaccgcccgcaccgcctgtgatcagataaacaccattatccttccacggcttttcggcgccgagcggttcaagacccgtttcctgccattgtgccgcatagcgcttgccgttttcatagcgaatatgcttgtcatcaggatgagcgccgcattctttcaaatatcgggtcagcgtgtctgccttgatgtccggctccaattcgatcaattggcccgtcaggttcggattttccagcgccgctgtttttaaaagtcccgttaagccgcaaaggagctgcgtatcagcttcttgaggcacgacaatctggatgagctcgcggccgccggattttgaagcgaggattttcttcacttcttcaaaagcctgaagtgcacaggtttcaaaccgttcgtcttcactctgatgctgatcacggagaacgttacagctgaagtctgtctgtatgctgttcatttgatccgtaaaccgatcagatatcatcacgtgatgggctttgaaactgatcgccgctttttcatgcgaagcagtcttctcttcccatatgtgttcaaaaaatagtgtatctgttttatccgtttcaatttctctcgctgaataaccagtcatcttcacacatacatggccttgttcgtcacataaaacaatatccagcttctgcacggcatcttcaggcctgctttcgccgctgtacgcaatggaaacccacatgttgctttcacagcgtttcagcacatcgatctgttcgagagcaaacggcagcatcggctttatgtcagtcccgtctttgtcaagcattaaaccgatcgtcgcgtgaaatgccgcatccaagagactcggatggaggacaaattgatcttttgtatgagaaatagatgacgggagtgagagctttgcgagcacttcgccgtcttttgcatagatttccgtgaccgctttatgagcatccccgtattcaatccccatctgtctgtatgcctgatagcaatcttcaggcgcgatcagacgtcgcgattctctcaatttgtcaatctctattttggccggttcatccgctctgacaaacgatgcgcttccttgcgcatagagaacaggctcttgttctgatgaagccggttcaccataaaccgtaaatcccatctccccattttcttcgtcataaaggcggagatacaattcagcggtttcgtccgtcgctgtaaacggacgcacccatacgacatgtttcaggcggactgttccttcttccttcatttctgccgcatgttcagcagccgctcggaccatttccagataagcggcgcccggtaacgtccgttcgtttttgacgacgtgatctttcaggaaaaattctccgccgctaaaggcagtcctgaaacggacgcctgacatgtttgatacattttcatgcagaagcgggtgcagcatgccggcatttttttgaagtaccgtttctcttttttccgcctctggcacccaataccgtgttttttcaaacggatatgtcggcaggctgatccgattcggtttgttttctccgtataagagattccaatccatcattcctccgccggcccacttttcggcaatcatctccagacttccgctagaaagccatttatgtattaagtccggagcaagccctgcctgtttgcctttatcggctctgttccgccagcatccgctgaccgcgtctccatccagaaagcctttcagtcgttctttgagctgcgtcatattctgagcggtgaacacaacccgctcctccatctgctcacgcccgacctgaagcgtgtaagccagatccttaaggggcagatcgggatggataaaggcagacagcttcgccgcatatgcatgaagccgttcttcacttttagcggaaaccgggaaaatgaaagtctgttcttccgccggttcagcatttgttccgtgtgattcttccgggataaattcctccagaatgagatgcacgtttgaacctgtggccccgaaagaactgatgcccgcacgccgcggatacactgtttcgctcccgttttccgtcactgaaggctgatgccattcttcggtacgatgctggacgtaaaacggtgattgttcaaaatctaaatacggattcagttcttcggaatgaagcgacggcaccaaagttttatggtgaagctgcagggcaaccttggttaagccgctgatgcccgccgccgattcagcatggccgatattcgacttcactgatccgatggaacagaactgcttatcctgtgtatactgacggaacgcctttacaaggccttgaacctcaatcggatcacctagagaagttcccgtcccgtgcgcctcaatataactgaccgtgcgcggatcgatgcccgctttatccagacattcctcaatcaaatcggcttgagcgacaggactcggcacggaaatcccgctcactgttcccacgtgattgacggcactgccctttacaaccgcataaatccggtctccgtcgtttaccgcttcctgcagcggttttaataaaacagcaccgattccctcagccgggacatagccgtctccgtctttcccgaacgtatgacaaaccccgtctgatgaaaacatatcccataaaccgtatgtcacatatttattgggatgcagcgataagttgacgccgccagcgatcgccgattcacattccccgcgccgaatgctttccacagctaggtgaaccgcagtgagcgaagatgaacagaccgtatcgaccgccatgctcggtccgtgaaaattacaaaaatatgaaactctgtttgcgatttgcgcataattaagagaaagcgggaatacatgatcttcagaagaagcctccgctccgaccaatgtataatccttgtgcatcaccccggcgaagacgccgacgcgctgtcttctattccgtccgcgcgcctctgcaagcgacttcggcgtatatccggcatcctcaattgtttcccagcatgtctgtaaaaacagccgctcctgaggatccattgtttcagcttcacgcggcgtaatgcggaaaaattgaggatcaaagcagtccggatcatcaataaatccgccccattttgaaatggtctttccggaaggcgactttacgttttcaaagcggcgccagtcccagcgagactccggaatttcggtgacacagttttttccttcttttagattttcccagaattcgtgaatgttttcggcctgcggatagcggccggccatgccgataatggcgatatcttcatcttgcggaacactgcttttccgccttttttctgtttgcgtcacaaccggcttctccgtttttggagcagcagcgctgaagtagcttccgtactgctcagtcagaaaagccgccagttctgctgccgtcgtatattcaaacagcaaagtcggagaaagggtttcgccgattttttcgctgatcgtttccactacgtcaagcagtccggacgatgtcagccccatttcatagtagccggcctgagaatcaatctgttcaagcggcttgcccattttttcagccatcagcttcttgacataccgctctgcttcctcatgcgggtgtccgtcttcaaatgatgccgaaacttccggcagagccgctttttcaggagacttctcagcaggctttcggtctgtattgatcagttcggcatcccgcacgagcttgcttgtgaaatctttcagctcagcgactttccggccggatgcgttaaaaaactccagcgtaatgtaaatgagctccttttcctgccggagcgatgaacgtttgattctcgtgacgcagccggcctgcaaaggttcggaagctgtaaaagattcatagaaaagaggcagaaacagcctcttttccccatttaacagcgacgaaatcaataggtttgcgccgacgccgcttccgtcaaggagagtcggatggaacaaaaacccttcggcctgtcccatcgcgtcttttccgagcgataaatcaaatgtgacgccgtcccgctcctcaaaaacatctccttctgctttcatatatccgctgtgaaccaattcctggcttctgcattgtgcatacagctcgtttaaatcgattgtgcgttccgcctcacgcttcacagagtcaagatcaatcgtgtcactgaataccgcgggagccgtctcatgcatttccgctttgacgtaaatacgttcgtccggctgcacgcgtccgccgctgacttcagctccttttgcggtaagtttccagtgcccttcttttacctctgtacattcaaccgtaagcttgacggcactgtcttctttcgcaataagcggctgataaatggataaatggcgcagctgaagcccgttgtatgaatagccgcgctctttgaaaatctgataaaacatatcaatataagccaatcccggaaggactttttgtccgtacacgtcatgattgaaaataaacggatttttcagcgataaagtgatttgcttattgaagttcttcacgttaaacctccacttcataggtatcccagatgtttgccgcagctttttcgttcgcttcttctttgctgtccggcgaaatcagccgcttatttaatactggcggtgttaaaggatggcgcttgatgcggcgcccttcgtctttctgccacgcttccacaatgacgtgggcgtttgtaccgccgtcggcaaagcagtttattcctgccgccggtattggtgacggccagtctgccagagtgcgggtgaactgaatattggccttttctctgtcaaagtgtgtatgttcatgctcgcctgataaaaacgggataaagcttttctctttcagcatgagcacaacttttatgaaacttgcaattccttccgcgcaaagcgggtgcccgatgttcggtttcacagagccgattccgagcgggccggcgtctgttgagcggtagacggattgaatggccttcagttctaacagatcagtaacggccgtacctgaaccgttcgcttcaatatgggtgatttcttccggccgttttccgcttttttcaagtgccgtcttcatgacggctttttgcgcttccagactcggcgtagccggtcctgccgttcttccgtcattattgacagaagccgccttcactacggcataaatcgaatctccgtcttcaatggcctgagacacggtttttaaaagaaccattccgacaccctcgcccagcacgactccatctgcgcgttggtcaaacacatggaacgactgcgctttacttaaaatgccgcgctgttcaaacaatttatgggtttcttcagattcaaacaggctcacgccgccgacaacggccgcttttatttctcctgttacaagggcttgcacggccatattcattccgactaaggcagaagagcaggctgtatccagaacaacactcgggccgcgcatatcgaagtattgggagagatttgcagccaaatagttctgcccaagcgcgacaatcggatttttcgcatccagcagtttctcttcacccggtctgtgacggctccgtccgccaagatacacacctatcgcatcccccttgatctcatccggcgaatagcccgcgtgataccacaggttaagacactcttccagaacagccagagcttgagggtccattgcctttacatcctcttcagccagtaaaaagaagtccggatcaaattgatgaattccatcaagcattcccgcgtaataaggcgtcttaaaaccccatcgctcagccggaacaggacggatggccgaacggccttcagccaaaagcgaccagtattcctctaaggaagccgcccccggaaaccggcaggacatgccgacgaccgcaatatcttcaccgtgaatctgttttccggccggctctagttgcaccgataccgcttgtgtttcaattgccggctcagccggcgcttttgaaacaggattgtccgccttcaaattaaacagatctgacaacacctctgtgtgtcccttgagaagccaatttgcgaaagattgaatggtcggatattcatacagaattgacgggtcaagagatgccgagagatcccgattgatcctctgcagaagctgggcaaggataatagaatccactccgtactcttggaataatacatctgtctcaagctgctcctgatcaatccgcagttcttcagaaaataatcccgtgagccattcttctgttttgcttgctaattgtgcgttgtctccggcagtatcagtggtttttcccgccggttttaccatagccggacttattggcttatcctgcctgctccgccgcatgaattgctccggtttccacagcttaggattcagaacggccggcatcaccgggccccttgctgattccagaagtatgccgtcaaggagctgtaatccttctgcgttcgtgatgctgtataagccgctctctttataagctttgttcgtcacttcgcccattccggtttctttccagttcggccactgaatgctcactattggcaattgctctttgaatgagtttgcaaaatagtccatatacgcattggccatggcataatcggcctgtcctgccgaaagcgccggtatcgcagctgacacggaagaaaacaggacgaaaaactccagcggttcaccgctcagcacactgtataacgcctgaagcccgtctactttcggctcaagcacccgctgtatatcctcatcggtttttctgataaatgcgagcgtctctttatctgtcacacctgcgcagtggataacgccgccgatgggcccgagcgtctgctttatctgattcagttcctgtctcagcccggcttcatccgctaacgaaactgacaagacattcacttgtacacctttggattccaaatcgagaacagcttctattttcgcttttacagaagccggcatcccattcaggctgcctgtccactcatttcgcggcggaagggtctcacggcctgtaagcaccaattttttcacaccgtaatgttcggcaaaatgtcgtgcgcataaaaggccgataccccttgtgcccccggtgatcaaaagcacatggttttgcggaaattcaattctcccgacttttaaatctatgttttctgagtctctcaatacgccccggtagcgcaagccgtccctccggcaaacctccgcgtcatcagtgcgggcatgaaactcatcagcaatttgcttcgccagtgtttcatccggcagcactccttcaaggtcgaggtgccttgatgacagatgactgtactcgtatgccagcattctgtacagaccggcccgttctgatccggttgtttgattggcctcttttcctattgattcaaggtctttcgtgacacaaagcagtgtcagtccgtctttatgcccatgctcaatcaattgctgaagccattggataccggtcatgccttcaggatcttctttcgctgcaccaaggagatcgatgactccgtcaaacgcctgccagtcatattcaccagtaaggtctgctgttgtgatgatccggttgttcggcatatgcccggcgatctcttctgcgagattcatcgtgtccccgcctgtcaaaatcgcaacggggcgtgtgcacggttcacgcagttcaagcgggctcagctcccattgtttcgtcaaaatgcgtttgatccgctcttctgtacgagcctgattcttttcgggattctccggcacccaatacatgtctttggcaaacggataagacggaagactgactaaacgcggcgtctttttttcatacaggcggttccaattcaacacgccgcctttcacccatacctctgccagcttggcgaattttccttttctgatccaggcatcaataacgatgtccatatcttcatccgccgtgaacaaggcaaacgtatctttattgcggtgagactggccggtatacagcccggcggtgtttttctcatttcccgtaaatgcttccagctttgtttccaattccgccatcgtcgctgcgagaatggccaaacgctcttccatttcgtcccttccggtttgcagtgtataagcgacagccgccaagtcttgatctgtgtacggtgtttgccggatcgctttttgcagctgctgcgcctgttcaaacagtttttcttttgatttggcggatagaaggataatggccggattttccggactgtgctcaggctgagcggtttcttgcgggacatactcttcaatgacaatatgggcgttgaccccgccgatgccaaatgagctgaccccggcccggcgcggaatggcatttccgtttctatcttccgctgccgtccattcctgattttcctgcacgatgtagaaaggactgtcatccagctgaatgtaaggattgattgtgtcgcaatgcaggcttttaaccagcgttttgtgcttcatttgcaaaagcactttcattacgcctgatactcccgcggcaagctccaaatggccgatgttgcttttgaccgagccgatgccgcagcggtgatcagagacttcaggctgctgatttgttttcgaaagctcgtgaaacgccgctttcaaaccgtttatttcaatcggatcacccaattccgttcctgtaccgtgcgcttcaatatacgtgatggtgctcggatccactcccgctttccgataagctctcaccaataagtcagcctgcagtttcggattcggcgaggttaacgtattcgcccggccgccgtgattttccgccgtaccgcggatcacgccgtaaatcggatttccatcccgttcggcatctgtcaatttcttcagcatcagaattcccgcgccttctcctctgacatacccgttggcatccttggagaaggttttgcattttccgtctttgctgagcatgcctgctttgctgtagctgatatgtgcttcttccgtcagaatcgtgttgatccctccggcaatcgccatgtcgcattctccgttttctatagcggataccgcccggtggatcgccacaagcgagcttgagcatgctgtttcaatcggctcgctcggcccgtgaagatttaacagatagctcaaacggttcggccctatggaaggaatcatgctgcctgtcgccgcatgtccttccggcgcaagacccgctcttgtgaacaaatctttatacccggtatttccggtgccgataaagacgcccgtatttgtaccggaaaggctctccggcttacagcccgcatcttctatcgcccgccatgcataagtcaataacagccgctgctgcggatctaaatattgggcttcccgcggtgaaatgccaaagaacagcggatcaaattcagctattccgtcaataaagccgccccacttgatgttcgttttgtttccttctagattcggatcgccatcaaacgcttcccaatcccagcggtctttcgggatggttgtgatagaatcttttccttctttcagattgcgccaaaattcctctatatccttcgcgcccgggaatcggccgctgattccgacaatggcaaccggatcgaagcggcgcggctcttttgtctctgccgcagcgttcattaccgtcgcgaatcgctttcttcgctccattttcggcttacgggcttttggctgctcttctttcggtgactctttcttcttttcgccgaaacggcccggatgctcttttgccaaatatccggcgagatcgctgaccgtcccgtactcaaagaaaatcgtcggtgccagctccagctgatacgcttcatttaattgattcgtaaagacggtaaatgatacagaatcaaaaccgtattcactcaattccgtttctatatcaatgtcatcacggccgacttttaaaatttcgcttaccatagctgtcaaagcgatatgaagcgtttgaagaaattcttccgcatcttgtgtttcttccggctgagaaggaagcccgccttctgcctcatctgtcaaatactccgctaaactgcggatcgttccgtgctcgaagaaaattgtcggcgccagttccagctgatacgtttcatttaattgattcgtaaagacggtaaacgatacagaatcaaaaccgtattcactcagttccgtatctatatcaatctcttcttggccgacttttaatattgcactcaccattcggataagcgaatcgtgccatttgcctgctgagccggcggatacaggctcgttcgtcttctcctgcggtttttcagattcagaaacggttaggaacgtccgtttcaattttgctgcgtgtccttcagccgctaatagctgcggcttttcctgagccattccttcataaaatgcagccagacctgccgccttctgcagcggaaccatgccgaaggattttttcatcattctctcggtctcatctcctgcctgcatgccgccgtctttccacagcgtccagttaaaggcgatcgtttttccgtgccgcaggccattctccgtaagggattgcctgtaagcggcgtacgcatccataaacgcgttgccggcggcataatcagcctgtccgacattgccgagaacaccggaaacactggagaacaatacgaaaaagtcaaggttgcaatctttgctggcttcgtctaaataagcggtgccgatcactttcggagccagcacttcactgaactcttccttcgttttttgcagcagaaagcggtcttgtatcactcccgcagcatgaataattccgttaagcttcccgaattccgccgtcagttcttttatcagcgcttcgttttcccgccggtttgccgcgttcagctttttatagacgacatttgcacctgcctgccgaagcatagcgagctcgcgctgcttggcttcagtcagatcagagcggccggtcagaatgacattcgggtgttttacgcgacctgcgatttcttgtgcgaacatcaagcccaggcttccggcgcccccggtaatcaaatatacgccttcgtccttccagacggtgccgcttcctgccggattcatttcttcccaagccttcacataccgtttttctcctttataacggatatgtttatcatgcggccgatgactgtcgtttttcagtttttgagcgacagccgtcattttgccgattgagtctatttcgatgagctggcagtcaagttttccgtattccagctcggctgtttttaacagacctgttaatccggcaaacaattgctggctgccgtctgctgaaataacggtctgaatcagaatgcggccttgccttttttcgctgatgatccgctggatgtgttcagcgatcgtctgcgcatagctttggaaacgttcagcggctgtttcgtcctcactttcaacaaacagcagtttggcgtctttcaggacggatgccactttatcttttacatggccggcctcttcacaaagtatgatcaaatgctcatcagcatggaccgaagcttcatcggatgccgcagcttctttccagaccggttcaaataaaaccttttccgagccggatggcgactgagccgattccgcatccccttcaagcactctcgtagagaagcctcttatcttcacacaaagtgctcctgtttcatcaaacaggtcaatgtcggctttctgcacggaatcgccggcttgatatccttcgctgaagcgtgcatgcgcccgcatagtcggcgtgcatgctttgacgacttcaagggattcaagcgcaaacggcagaatcagcttttgtccggaaaactcctgcataatgcagattgtcgccgtctgaatagccgaatcaataatgctcggatgaagtgtaaattgcccgttcgtgtgagaaaccgaagccggaagctgtatgtccgaaaacacttctttttcgccgatcaaggcggatttgatgccttggaacgcttttccgtggaacatccccctgcttctgccttcccgataaaaggccgccggatcaaggatgtcagctgtacacctattttgtatggcggaaaggtctgcctcaggctcttgttcagcctttatgatttcggcccgtccttggctgtgcagcacttcttcatcgtcagcgtttacgctgtaaatgtcatacgagatgattccgtcttcttctggagacagcgcaatatggacttggcgctcttgttcgtgaacgacgatcggcttcagccagaccgtatgatggagcgtaattctgtcgccgtcttttaataaaccgccaagcgcccgttttaccgcttcataagacatttccaaatatgccgctcccggcagcaccgctttttccctgaccacatgatccttcaggaaaaattctgagcctgtaaacagtgagctgaaccgctgaatggccaagtctgacgtgttttgctgcacgagcgggtgtaaaactgaaattccgttgtgtgcggcagatgttttctttcctgcttttttcggccagtacggttcctttgcaaacgggtagaccggcacgctgattcgcttcggatgcttgtctttgtaaagcttgcgccaattgatggcgacacctttactccacatctcagcgagcttcgatccttttcctttcgcaagccatttttcgataagttcagcgctgtcatcatcatcagaaagccaggcaatgtctttcgcctgctgtttttctcccgtatagcagcctgttatagccggcttttcattgataaaatccgtaagctgctgcttcagctccgctgttccgcttgtaataaaagccgcacgttcctccatcgcttcccttccgacttggaaagtgtaggcaagatcagcgagatcagcatccgtttttccttccagaaaagcaagcagctgttttgcgtattccttcagacggtctttttttctggcagacaacggaatgatgaacggaccgccccagtctcttgcttcagatgcatccggatattgctcaaaaatcgcatgtgtgtttgttccgccaagcccgaatgaactcaaagccatgcggtgtgccgtgttctcccggcctaactctttcttggcttccgcaacgtaaaacggagagtcttctaaatgaagattcgggttcggctctttgtaattgatgctcggcgcgatttcctgctggtataagctcatgacaaccttgatgcagccagccattccggccgctgtatccaaatgtccgagatttgttttgactgatccgatgccgcagtattgttttttatctgtatatcggccgtacactgattgaagagcggacagttcaatcgggtcgccgagtttcgttcctgtgccgtgagcttcgacgtatgcgatcgtttcaggatggatgcccgtctgatcaataaccttctgaatgacgtcagcttgtcctttaacgctcggcgcgtaaaatccgaccttatccgctccatcgttattgactccgattccgcgcagcagcgcataaatatggtcgccatccttaacggcatccgaagcttttttcaagagtacggcgccggctccttcaccgccgatcattccgtcagcagccgcatcaaacgctttaatatgcccgtcgcttgaaaaattcagccccggctgatgaatatacccggcatttgattccgtatgaagagtcgcaccgccgacaagggcgtacttagcttccccggactgcaggctttgaaaagccgaatgcaggccgattaaggaagatgagcagttggcatgaacaaaatagctcggccctttcaacccgagtttatgagaaatcatcgtcggaatcgtcccgctttgggcaagcacccatgacacgtagccatccggcgtttccagctgttctgtcgtctcctccggcagcaggctgcggtaagagttcgtgcttgcagacatatacacgcttgtttccggaatttcttttgaaacgtaccccgcatcctcgatcgccttccaggaatgaagcaaaagcattctcagctgaggatccatatattcggcatctttcggtgaaaagccgaagaaaccgggatcaaacatttctttcccctctaaaactgatttcgccggaacgaagccgggatgactggccagttcctcagaaataccgaatcggcggagctcctcttttgaaaagaatgtgatgctttctttgccttctttgatattattccaaaattcataatgatcctttgctcccggaaactcacaggatataccgataaccgctacgctgtcttcgtaataatcaggaaattcccccggcgggtttttccggtcttctgcattcactttcttttgcggcacaggagcagaaatgacttctttcggtttttgttcagcgataaaccggctgatgtcttttaccgtcgcgtattcaaacagctccgtcacactgaattcacaatccagttcctgcgtaatccgatcagttacagtcacggcaaggagcgaatcaccccctgcatcaaaaaagcggtcatcaagctctatgtcactgcttttcaatacgtcctgccaaatggccagcaccgcctgctgaatatgagatgaagaacgtgtttttgtttgcggctgtttttctgtcagatcgcgtgctgcaagaagcttgcggtcaacttttccgtttggtgtgagcggaagctctttcaggcggataaaggaaactggcaccatataggccggcagcgattgtttcaaatgattgcgcaaatcctttgaagagggaagcggctcttcgtctttccggatataaaacgcgcaaagcttttcatttccggagtgattgttcacaacaactacgctttcctgaacggccggatgggcattcagcctgctctcaatatctccgggttcaatacggtagccgcggattttgacttggctgtccatccgtcccatgtattcaatgcggcccccgggaagaaaacgtgccatatcgcctgttttataaagctttgaccccagttcgagccgatggctgacgaaggctttatctgtcagctcaggcttgttgaaataccctctagccaatccgtctcccgcgatacaaagttctcccggcaccccttctaaaacaggattgaggcccgaatccataatatacacacgggtattggcgatcgggcgcccgatcgtaagcgcactctcattttccgttatacgctgcacggcggaccagattgtcgtctctgtcggcccgaacatattccaggcctcacttttcgtatcaaggaattgctgcttcaattgttcgctaagcgcctcgccgccgcaaaggattttcactttctcttcatttgtccatccggaatgaaagagcattttccacgtaaacggcgtcgcctgcatgatcgtcggtttgtactcttgaatcagctctttcagcttccgtgcgtctttagcgacttctgtcttacagatgttgcactcagctcctttgattaaaggaaggtacagctccagcgccgcgatatcaaagcaatatgtcgtaacggcaagcagtttatcttcggacgaaagacccggctcatgcgccatcgataataagaaattcgtcagcgcccggtgcggaatcatgacgcctttcggtttgcccgtgctgcctgacgtgtaaatgacatacgccaggtcgtcaggtgttaccagccgcttcagcgacgttctttccgccgctgtctgttcaatgtcatgccaatcgcggtcaatggcagctgtctgcacgccgccccagttcaatgaatgctctaaatcagctgtcgtcaggcacattgaaatcctgctgtcagcgatcatatattccaatctgtcagcggggtaagaaggatcgagcggcacatacgctcccccggcttttaaaataccgagaaggccgacagccatatgcaatgaacggtctgtgtaaatgccgatcagttcgtcaggccctgcgccgtgcgcctgcaaaaagagcgccagcttcgtgcttttttcatccagctcgcggtatgtcagcttttgctgttcataaacaaccgcacaagcatcaggcgtttctgccgcctgacgttcgaataattcatggaagcaggcatccggatactcacggcttgtttcattccaagtcttaagaatcatttgctcctctctttttttcatgagagaaacgtcctcaagcggcatatccgcatttgccgtcaaagattcagcggcctgtacaaattggttaaaaagtctcgctgcccctgcttcatcgaataattcagtgctgtatttaatcgtaagatccatgccggatgcttcttcccacatttcaaatacaaggtcatattccccttcctgatgaatgtcttttacaaactcacaggagaattcattgtattcatcaagcatcgattgatagcttgaatcctgcagaaagttctgatagaaaaaggcgttgctgaaaataggcgaaccgttctgccggggtttcgcatgaacatcacgcaccattttcggaaacggataaaatgagtgatccaatccgtccaaaacggcatcctgcaccttttgaacaaagtcagcaaacgtttcttttcgtccggctttgcttcggatcggaagcatgttgaggaaatgaccgatcacaccatcaaagcgttcttcaggtctgaccattgcaggcatgcctgccacaatatcttccttatctgtatatttcgctaaaagcaccatgtagcagctcagcatgacggtggacaagtgaatcgaacgggatgcggcaaacgccgtgacatttttcagcagccgttcaggaaggcgtcgtgtcagcgtatcttctgtaaactccggagcactgctgtccgtgcgcatcggcggaagctggaggtcgggcagatcgcccccgagctgtttcatccagtaagcgcgggaagctttgctttcttcacttgccaagtaccgcttttcccaagctgcgtaatcgggctgaatgccggaagcagcagccgcaaactcttcttttccctgaagcagcgcctgatagtgatccagcaggctgtgaataaatgtaatggatgaaatgccgtcaaacacgatgtgatgaatgactgtcaaaacataatgttccgcatcggattttgaaagcagctgcacacgcagcaaaggtccgccttctttgacaaacggctctttcacttttttccgtatcagagcgggtatttgtgattcatttacgtcagaaatatcttcttccataaatacaaaaggatctgccgattctatgaaataaagcccgccgtctgtttctttcacggcgcttttaagcatcgggtgctgtgttaatacgagctgaaacgcctgcttcattttctctttgttgattcctgatgtgaatcggaaacagagcgggacatggtatgcagtcgtttcaggcgacattttctgcaatgtccacagccctttttgcacttctgaaagcgctggcgccgttttctgtttctcacgttctgccggcagctcggcttttgcgggatgatgatcagcggaggtgctacccgctttttcagcggtataagccgctaaagcgccaatggtcgggttcttgtgcagctctcgcgccgtcagccggatatgatacgttttttcaatcgatctggcgagtttcatcatcttgatggaattgacgccaagactttgaagcggtgtatgcggatcaacgagttcatccgcgatagaaagttcctctttcagaaaacggataaaatcccgttcaatctctttctccgcagaagccgattctgaacggccgtcttcttgcttgttattatgtaatgaatcaaattgtccttgttcgaatgaatgtttcagctgagtgcgctggattttcccgatcgccgtcttaggaatgtcttcttttgcgaccggaagcagataatcaggggtgacgccgattttctgtgtcacatgctggtgaatgtgatgaagaagcttcgtcatgcggttctcatccaacggaacggatgtcacaaagaaaatcgccagctcgtctgtcgtgctttgattcggccggacggcgcatgccgctgtatatgacgtttcgatttccggtaattcctcaacggctgattcaatggcgtggctgtaataattcacaccgttgataatgatggcatctttcgttcggcccgttatcgtcaggcggccttcacgcagaaagccgagatctcccgtttcaaaccagccgtcttctgtaaagacactctcgtttaagtccggacgctcataataaccgcttgttacagtcagacccgacacttggaaacgtccgatttctccttcttccaccacctgattgcggtcatccgtaattctcatattaaaccccggaatcgggagaccgatctccacgaaacgatcatcatcactcgtgttttccagtgtaaactcatctgagaaaataacgcctgaagatgtttcggacattccccatgcgggacggatggcattagccggcagaccatgcggctctaaaagctccataattctgcgcccgactttcgcaaccgtggcctcccctccgttcagcatgtaacgcatggaggataagtcccatttccggttttgaatgtcttctgcgaaatcggcgagcagtccgaaggcaaaattaggcgcccacgtgaccgaagcgcggtaatgatcaatcagatcaagccattttaaaggatccatcagaatggattcgctcggtatattgatttcttcacatccgagataaacatcacgcagatggagcatcccgatgccgccgacatggtcaaaaggcatccagttaaacgtgacatcctcacttgtatagccttgcatctgaatatttcctttaaccatgcagacgatgttttcatggctgagcatcacggctttcggcgtgcccgtgcttcccgaggtcaaaagcagcatcgccagatcatccggacggggatgatggcagtcctcagccatttcctccgctgaaagatcttctgccgccaaagcgcagaacccggaaagctcctgctccttcgcccatgcagtcatctccggcagcacttcacggctcgtgatgacatacggctgattcaaaagcgtccaggcgtctttcagtttttgcgtcccgctgttcatttctgtgtaagccggagcggccgcaagcggaaccgggatcgctcctaaaaaaacacagccccaaaaagcaggaatcagctgagaattgtcacttagctgtaaaatgacttcatcctgagccttcactcctgattggcggagtcctttcacaatcgaaagagcgatctttttcaagccgctgtaagtctgatacacttcggtgccgtcaggctgtatatatgtgatgcccttttgatctcccgctgccgcggcggttttatgcaggacttcaggaatcgtcatcggctgatccgctgaaagccgcaatgattttccatagctgacagatggcttgagtaacccgcttgccgtcatatcacttttcatagagctgcctccatttcatctgtatgtatgatgtatttcttatactccgtacatcgtcgtgattcgttttttcacttcatcatcatgaaacgtctggtcgtgcatgattaactccttctcaatgacggccggaagctgctcgcgtaacggcgtcaccaagtgccttttcaatgtaattaaagagtttctcggtttttccgcaagctcgcgggccaattcgtgcgcatagcctaatacttcctgccgcggaagcaccggaaaaggcactcctcttttctccaggtcaccgccgcggtagtggccgccgtttaacagcatttcatgtccgaggcttgtcccaagcttcttcggaacgataaaggtagcgcccattccgggggtgaaaccgtatttcataaagtttgcggtatacacgctttctttgcttaaaatgacaaaatcactgaacagccccatgacaaacccgcctccgattccgtggccctgcatggcggaaatgacgggaatatcacattccagcgccaaagagtacatgcggtcttccgtaaatttcgtgatgccctgctgaatcctgagcaagccttcctgtgtgcctccggaagcaaagtaatggccgtagcctgttaaaatcacagctttatagactgacgatttttttatacgggtgaaggcctccatcaatccatccgtcagctctttggagaaggcgtttttgtgggctttatcctgcatggtcacttggataatatccggttcaatttcgagcagttcaactgcggcgttcggcatgatatcctcctaactgttctccgtttcccaaggaagccgccccgtttctgcataacggatgatggctgtttggttatccggatctgaaaacatcgcttgattttcggctaaagcaatggatttcgaacgatgaacaaggtcgtttaaggaatccatgtaatgtttatagcgggtgactgcttttttcgacagcgggcggaggcgcagcaaatgctttctcagctctgttgcgctgtccgggacgcatacgtcacaaagtccccattcaagcgcctgccgtgccggcacgggctttgtcataaccgtcatataatgcgccttttgaaagccgattctttgaattaaaaacggcagaacgcaggcgggataaagcccgaataacagttcagataaactgaatgaagcgctctcgtctgcaatgacgatatcgcacgcggcggcaaatccgacacctcccgcgtttgcttttccgcggacgcgggcgattgtgatgtacggcccggattttaatgccagccacaaacggtaaagcggctcctgggattccgcatgctgcataccctgcctcattttcccgtacatctcatcgaaatccgccccgaaacaaaatacctccggcagcccttcaagcaccacggaggtcacggagtcttcacattcagaaagaacatgcagacattcctccactaaacgttcattaatcgtattgttggcttcaggccgataaaaggtgatgaaacagacattttgctgaaaacggacgtttatcgtctcataggtcacgagatccacctgtatttccgatgaaattctgtgatttcttccaaatataaacgagggcttccggcatgatggtctaatattttcggaatcatattcatatccaatttgacattccgtgttccgaactttaccaaaccgctgcctttaaacagttcttcatactcctccatggacagcctgtatctgttgttcagatgctcttctattttgaaagaatgctgccgtgcttgtccctcaggcgtcacaacgccgctgtaaaattccgaacagcatcccgacccgtaggagaaacagccgatccgcttagaagtgtcgaatgccccttggtcaatcgtgctggcaagggccaataaagaggctgcccccataatgtttccgactctttggcagtagcggagccccggttccaccctggtttgaaaatcctgttcgatctcagcgtttttcgcttttgcaagcttgcgcatcatcgtccggtgggctccttttaccatgccgccaaacggtgtatggaaagcaagatagtgaaacgtctctttgtaatcagcgtccggcacacgatttttgtactcgcgaaatgtctgttcgcagcaatcgagataagacatcaatgataaatcggcatcaccggcttcactgtcagggatcggacggcatgtatccatcacctcatagccgtagtagccgtttgcgccggcatccgcctgaaatacgatcggattttcaccgatcaataaggcaaccgcacccgcaccggcgctcggttctgcgtaagaccaatcctcgcttagcgcatcgccgccttcggcaattaaaaaccgggaaatatccgtcgcaacgacaagcgctttcgctcctggggaggtctgtgacaaaataaagttaagtgccatctgcaggcccgccgttcctgaatagcaggcttgcttcaactcaaataaacggcagttccgattaaggcctaagtaatcatgaatatatgtactgagtgattttccgaagtcaatgccggactccgagcaggtaatcagcagctcgattctgtctctttcagcctctgtcaatcggtcgataatcggctttgccgcattaacgccgaatgtaacggggtcttcatatgggagcgccaccgctttttctttcatcagtaaattctcaaatctggcagggtctaagtttctgtactccgccagctgcatgacatcaaggtatgccgtcccgccaaacacatttatcgcttctattccggcagcagccatgaacttcgcctccaataagaattttgagcttccgattttcgcaccgttttatcagacggcctgcgccttttcataaagcttttctgccagttcgccgatgtttgacactcctgtcagctcaacacgcggaatctgcaaagataattcttccagcatcatcgtaattatttcagcgcgatccactgaatccgccccaagatcaactaaacggtcttcatgtgaaagctgttcgccttctaaatccggcaaaacctcgtaaatggtgttctgcagcaattcaaagattctttctttactcattgtcagttcctccctgtttcattctttttatgaatattcgatgttttcaatctatcatttcgtcttgtcaacacgtttgcagaaatgaacctaacttctgattcaaaagtgaggccgtctcttccataagacgcaggccgatgccatcgacatggcggtttttccatggttccagctccgtacctttcacccattgattaaaagcgcctaatgccggcccgcaatgaatctggtaatctaccttggcatccggatctcctttaatcgctgaagcagagctttgcctgaaataccatttgaatatgagcgccattttctgtttcggattccgttcggcttttgaaatgtcctcactcgaataatgcgccttcaccttttcataaatactgcttatacttgccttgaaatacttctcttctatttgtctgattgtcttttgatcaatttcttcgattgagccgtggcgctgatacagttcatgcagcttagcggcgcgggtcggaaagaacagccctttctttaatacctgcaccttgctgcctgattcaaacatatcgccggccggcgcgtaagccgtgtcctgtacattcatctgctggagcaggtccttgacgagaccgcttgtcgccgcttcaatggtgcattggttaattgatccggtcactataaaatcagcgccgagcataaatgcggccatggctgcctcaggcgtcccgattccccctgcggctccgatgcggacgtttttgccgtatcgatattgtttcatcatgtcatctcttaaacggacgatcgccggcatgaggctgtaagcaactccgccgtcagtgtgtccgcctgaatccgcctccacgcagatgtcatgcgcaacgggtatttctctcatcagacttgcttcttcagcggtaattttgttttcagctgcaagcttctgcagaatgtgatcaggcgccgggctgagaaatgcttccgctacttccggacgggacagcttggcgataatccgctgccgcgctatcacttgtccgtcggcacctcgctttaaccccttagcgcgaaacctgactaaagcgggagtaaccgttaaaaacgctgatgcttccaaattctgaaccccatgcttcagtaaaagatcaatcattttttcttctgaatctgtatgcttcatattatgtacaatatttatgccgaaggcgccgccgtcacgaagctcctgctgaattgacaaaatggcgtcctcaacgtgcgcgatgttcaaaccgcccgttccgaaaaagcccatcattcctttttcggccagtctgacgaccatttccttcgaagcgattccgcggtacatgccgccggccaagtaggcgtatttcagttgataatcacgcttaaactcttcgtttcctaaagatgccgccgtaattgagcttttttcagccgcggccgggacgttgatttcctctgttatcggctccgcttcagctgtaattctttgaatcagcccggtcagcacttttccgggaccgatttcctcaaagctcatgttttttcttcccattaagaagcggatgctgtctgtccagttcaccgaccctgttatttgcgctgcaagtgtctctttcagctctgattggtcatagggccttgccgtcacatttgaaatgaccggaattgacagcggcttgaaacggaaagattcaataaaccgggtaaactcttccttcgcctccagcatatatctggaatgaaaggcgccgctgacatttaaacggtgaaccattttcacgccttttacagcttcaaatacggatgcggccttttcaatatcttctttatatccggaaatgacaatttgctgcggtgtgttcatgttggcgatatcaatcatatctaaatgatattctcttaaaacgtccgtgacctgctcatgagtcaggccgatcaccgccgccatgccgccgccttttgcacggctcatcagttcgcccctttttttgaccagctgcaaaccatcttcaaaattaaaagctcctgaggcgtataacgcgttatattctcctaaactgtgaccggcggtaaaatccggtgtcaagccggtgtcttctgtttttttcaaataactgagggcattgacgatatagagtgccggctgagtgaattgagtctgattgagacgttctccgtccctgcacagctcctgaatggaatatccgagaatatgatcggcctttgcggttaattcaggatagcgggcgaacaggtcctctcccatccctattctttgcgaaccttggccgggaaaaacaaagctgatcatcttacagtctccttccgggcgatgataaaatgatgtcttcgatttgctgcaaatgtgtttgttctttatgaaacggcgtcataatggttcgtatgcgttctgccgaccctgcgggaaggatctgtttggcaaatgcggccaatgtgccggacggcccggcatcaatatacaagcctttttcacggctttctgcgaattgaagcgcttctcggaatcgaatcggctttctgacgatatcccagaaaaagtctgcttgaatatcggtctcagcctctccggtcatactggaaatgtacggtataaacggagtccggattgatttccgggctaaaaaacgcttgtacggcagctccgcctgatcaaccagcgccgagtgaaatccgtatgataccggcaatagctgatgaggaatctgcttttctctcaaatcgtccatgatttttttgatgtgtgcccgctctccagagatgacaaagtgagaatgatagtttacagctgccaattcactatgttcgcgcagcagcggatcatcttgatataatctcggatcacccagtaccgcaagcatgctgccgttacggcatgtttccgtaatgatttcggcctgctccaagacgcaatctaaagcatcttcggcgctaagcactcccgacacagcggccgcggcatattctccgaggctcgctccgatcacataatcggggcgtatccctttttgctccaaagcatacgcaagtgcgtactcagccataaaaatggcaggatggctgaaaagaaggcggtcaaatggatcggacagacgattggctgtatgataaatctctttaacgacagaaaaaccgaaacggctgacagcaaaatcgtccaagtcgagcattttccgccgaaaagctgcgttatgtgcaaacagctcttttcccatttgatagtattgagaaccctgtccggaaaacatgaaaacaattggctggctcatttgttctcctttttattgcttatttttttaaaatattgatttatgagttttcgtgatgtcatgtgaagtgatgtggccgtgatgttgtatgattggcaatgttgtgtgagataagaatttcgtcttacaatccgctacatggcgggtgaagcttcagtttcttttttgatgcggtgaataagccctgtcagcacatggcccggtccgacttcttcaaattccatcggccctttgttcagcagatagcggatgctgtcgttccatcgcactgaatggtcgatctgatcggccagaacggagtggattccgtcttgctcataaggtctggcatacacgttagaaatgacaggaattgatatagcagaaaaatgaaatgactgtaaaaatttttcgaactcttgttttgcttcgctcatatatctcgagtgaaaagcaccgcttacgttcagcggatgaaacagcgtaacatcttttattccttcgaatacggttttggctctttcaatgtcttctttgcgtccggatatgacaacttggtgaggagaattcatattggcaatgtcaatcgtatgtaacccgtgcgtttgaagggcgtcttccgcttgagccggagttaatcccataacggcggccatttttccgtcagtggccatactcattaattcgcctcttttacggacaagctgcaggcctgtaataaaatcaaaagcgcctgcggcaaacagcgcattatattctcccaaactgtggccggccacataatccggctttatgtcattgtcttggatttttttcaaatagcttaacgcgtttacaacatataaagcaggctgagtgaactgcgtcttgtgaaggttggaatacggattctcaagacaaagccgtttcatagaatatccgagtgtttcatcagcctgctcagttaagtctttaaattcgtcaaacaatgaacttcccattccctgtttttgagaaccttgtccggggaataagtatgtgatcattttctcagccatcctttctcggattcagataagaagcatgttcaaattgatagtaacttcacaaaaataccatgtcaagttaatttatcctatgcggactcctgaagaatgcctatttaaccctgcccagaaggcggattcaggtctttcggaactggcataaggcgaatgtcccgcccggcttttttcaggaaaactcccgtcacccaagtgattattaccaaaaattaagcaataactatcattccatttcagttgtttctagttccgaaagaaaaagtagataaatagaactaattatacgctacttaaaatgaaacagccctttttgattttttctgttgcgaaaattcacaaaatgttctttcttgtcaatctgaaagtaaatattgtttttcagaagactctccattttttgtcccggcttctccccgaaagagtgtcccggatatacacgcacatacggcggaatggaggctttgatccgctgtatactgtcaaacatatcctccgccgagctgcccctgtcctcacatataccgcaaccctctgtaaacacggtgtcaccggtaaaaagatgatcagaaagcaaatagcacattcccccggccgtatgtcccggggtcagtatacttttgatgataaatccccccgcggcaaaggtctgaccgtcttcaagcgctattaagtttctgcaccggaattgatagaaatcgatttcagccgacgacatgtatatatcagaatgatagatttgctgaagcggctccgccaagtttacatggtcataatgtgaatgtgttaataaaacagctgataaatcaacatccaactcatgcagtttatcggttattttgccgatttcccaagacgggtccaccgctatcgcagaatttctggcacggtctgcgataatataacaatagttggaccacatctgatgatacgttttgatttgatgcacttcatatgtatgatccattgtcaccattcccatttaaaagatccgggcagactgctgccgccgcccagctgactgtaaccactttaccagatgacaccacgtttttccatggattttccggtaaagttaaaaaactttctgctcctgtcaaaagcaccaggctgtgccctttcacaaattgctatgctgatatataaggaaatcagaatattcatatagatgaattctttagggatatttattcattaaagctgaaacatttattcgggtttccggcagaagaaaaacgaaaagtaagccaaaactatagaactagttatttagacctgattcttttttatttcaattatcaaaatgtttcaacgttaatatcagcatagtattcagttggtctttaaaggcaaaaatatcagattctcaaaaacaaaaaaaaggaacaccagactgttcatccagtgttcctttcttttcatcttacacgttctacatcacgcgtttaaacatcttttccatctcatacgtgctatggtgaataatgatcggccggccgtgcgggcatgtgaacgggtctgccgttcggcgcagatcgtccaagagcgctttgatttcatcgttgcgcaaatgacggttcgctttgatcgagcctttgcagctcatcattatggcggcttcctcccgaagttttttaatgtcgatctgtttggcgtcaagcacctgctgaatgatttcttcaatcagttcagcttcttccccttttggaaaccaggccggatggcagcggacgatatagctgttagtgccgaaagcttctaaaaatacccctacactttcaagctcatgctgatgctgttcaatgataagcgcttcatttgccgcatagtgaaaggtgagcggcacgatcatatcctgcacttcaggctcaacctgcccgactttttcccggaaatattcgtatttaatccgctcttgggccgcatgctggtcaatgatatacaggccgttttcgttttgggctaaaatatatgtcccgtgcatttggccgatcggatacatgaccggaactctttcttcctgtatttcttcggagacagcttcctcttccggcgccggaatatcagaaacaggcgcagccatttccggcatgctggtttccgacggcacttcatgatccgcttcatttgggtgaaactcttcttctgttaccggcgccggctcttttacgaccgaactcagcttcatcggcgagtaagacggctccggcgttttttcaggcagtttccgctcaggctcactttcaccgaacgtcataaattgctgttcatttttgatcggtgccggcgctgattttttcggaagctgggcgcttggaataagccgctgcttttgaaaaacttcctttatgccgtcacggatcagctcatgcagttccgtctctttgctgaggcggacttcaagcttcgacggatggacattgacatcgactaaaatcggatccatcgtaatttcgataaacgtaatcggatggcggccgatcggcagaagcgtgtgatagccctcatgcaccgcttttacaagcgggaaattcttaatgtatcttccgttaatgacagatgacatgtagtttctggatgcacgcgtgatttccggcagcgcaatgtagcccttgacttcaaaatcaagtgagctgacatggagcggtatcatttttttcgcaaccgccgtcccgtaaattgcggccagcacatggcgcacgtccccgtttccgtttgtctgcagcaggtttttcccctgatggcggaggcggatcgatacttccggatgcgcaagagcgatccggttgacgacatccgtaatattgccgagctccgtatgcacggttttcatatattttaatctggcgggtgtattgaaaaacaggttagtgacgatgatctccgtcccttttctgctggaagttctctgttcagaaatcatattcccgccctgaagaatgagatgagttcccgctccctcgccgatgctcgttttgatttccagatgagaaacagacgcgatacttggcaaagcttctccgcggaaaccgagtgttctcacccggaacaggtcattttcatctttgattttactggtcgcatggcggcggaaagcccgcttgcaatcctcggtttccataccttcgccgttgtcgagcacccgaatcgacgaaagccccgcttcctctatatcgatttcaatgactgtgctgtttgcgtcgattgcgttttccaccaattctttaacgacagaggcgggccgttccaccacctcaccggccgctattttatttgaaagctcatctgacagctggatgacttttgccaagtccgtcacctctttctattttaattttttttgcagcttgtacatttcattcatcgcctcaagaggcgtcatatcaagaatattgatcgacttaaaggcttcaagcacttgtttttctttatgagaaacagccggtgctttctgttctttttcaccgtctgcaaaaaaggacagctgtgccggttcttccttgacgacgggctttttctcaggtgccgccggaagctccggtttatctcctgactgctctagctgtttcagaatctcctgcgcgcggctgatcagatcatccgggagctcggcaagctgggcgacatgaatgccgtaacttttatcggcggctccttctttaatttgatggagaaacacgaccgttccgttatattcctcggcgcgcacatgaacgtttttcagctgaggaagcttatcttcaagcaccgtcagttcatgataatgcgtgctgaacagtgttttagcgccgatatgatcatggacatattcaataatcgcctgtgccagcgccattccgtcatacgttgacgtcccgcgtccgatttcatcgaacaggatcaggctgtcttttgtggcgtttacgatcgcgtttttcgcttccagcatttccaccataaaggtgctttgtccggagatcaaatcgtccgcagccccgattctcgtaaagatttgatcaaaaatcggcagaactgcttcttttgcgggcacaaaacagccgatctgggccatgattgataaaagtgcgatctgtctcatgtacgtgcttttacctgacatattcggacccgtaatcaaaagcatttcccgtgattcgcccatcaggcaattgttcggcacatattcttgactgtccatcaccttttcaacgacaggatgtctgccttcaatgacttttacctcattatcggaaaagacgggctttgtgtaatgcctgttttcactgatcgtggcaaagcattgcagtgcgtcgagctcactcatttgcttggctagacgctgcaggcgcggaataaattgcttaaccttttcacgcagtccggcaaaaagctcatattccagctcgcaaatgttgttttccgcttctaaaataagcgcttctttttcctttaattccggcgtaatgtaccgttcggcgtttgtgagcgtctgcttccgctcataccgcccgtcctcaaggagatgaaggtttgcttttgtgacttcaatataatagccgaacactttattaaagccgacctttaatgaacggatgcctgtatacgcgcgttcctgctgctccagtctggcaatccagtcttttccgtttttgctggcgtcacggtactcatcaagcttctgatgatagccgtcttttattaagttgccttcctttaaagataacggcgggttttcatgcagcgcatcttctaacaggtcaagcagatctccgcacgggtcaatcaagccggcgcgttcttttgcttttttatggttaagagacccgacaagctctttaatgctcggcacctgttttaacgattctttcagctggattaaatcccttgcattgacgtttccgaatgcgacccggcccgcaagacgctccaaatcatacacttccttcaggcgttcgcgcagatcttcacgctcaaacagatgattgatcagcgtctcgaccatttcctgacgttcttcgatttgggatgccctgatcagcgggcggtcaatccattgtttgaggagcctgccgcccattgctgttttcgtctcgtctaaaagccagagcagtgacccttttttgcttttcgaacgaatcgtttctgtcagttcaagattccgttttgaatacagatcaattttcatcgcttcttccaattcatacacttgaaccggctgcaggtgatccaggctccgtttttgcgttttctgcaaatacgtatataaacgcataaacgtctctgtcagctcttcgccaggtaagtgctttgcgatttcaatccggtctgtcattttcccgtcttcgatggaaatcgttgcgccgcaccgttctttcagctgggccgctgtattttcattaaacttgcttgatacgacaatttcctttgcgccgactgaataaatttctgacatgacatcttcaatccgttcaataaatacggcgaggttttctccagtcgttaagtctgataaagcaaggccgtatccgccaggaaatgcggaaacggaagcgataaaattgttttccgactcatgaatgccttttccgtccatcacggttcccggtgtgatcagctggacgacttctcttttgacaacgcctttggccgccttcggatcttccgtctgctcacagatcgcgactttatagccctttttaatcagctgttcaatataagccgccgcggaatgataaggcacgccgcacatcggaattttatcagccgatcctccgtctctgcttgtcagtgtaatttcaagctcttgtgacgctttttttgcatcttcaaaaaacatttcataaaagtcaccaagccgaaaaaataaaaaggcatcttggtattctgcctttatcttcaagtattgctgtatcataggcgtgtaactagccatcatttaatccctcactatgtatcttcttttccgcatcccattataacataaacaaaagagtgatatctttatatataaaaaagagacttggggtgttatctcccctagcctctgcttattcttcaggatctccgactaaaaattcagggttaatgtcctctaattcttcgtcaagatcgtcttcccaatcatcatcatcgtcttcttcccaatcagcatttacttctacgactactttcgtttccccgaccacttccgctaaaaactcccgctcggcctgaacaacgattttatttccgttaggagaaatggtgacttcaagacaattcggctgctgcagtactttggcaatgacttcgtgctcgtcatctaagtaatttgtatctctgtatctgagtttaatcacgtcaacatacttcactctctcggttacaacttccgtttttgtattatcggcgtaagagtaccagacgtttatatcataatacccttcaatctctaccgttttcccaatcttttcggcatcatacttgtgattgataatccagccgcccaatatgcttgacggtttttgatcaggtgagatcgtgttggtgcattgggtgaattttcttcctttcgcaactaccgctttcgtaataatttccctgtattcagacattcccgtaggcctccttgttcttcttcgtgttatcttatgctgggcatttgtctcatgtgcatttttataataaaaatataaaaatacaaagtttctgtttcattgtatgcagccctgcccagaaactttacttttaagtctgataaaactttttcgggaagatcaggcgaaacgataaaatgatgaatatttagtacatgatataattagttctttcaaaacaaaaaaacacgggccgatgaaggccccgtgtttaaaaggaacagctgttattcgaatgttttacttttgaaccggtttctcccgtcagcaggttgccgccggtagacgtaatgatttcgtttgtcacctgattggaaatcgtgtgagcgacaagctgaagaaggtcattaacctcaatctgggaatctctgaattcctgaatgatcggaatcgcttcaagctcttcctgcagggcgtcaattttactttccacttgtttcaaagcttcaagcttttcgtaatgcttcaggttaacggcttgcttttgcagggctttaatctgattaataatcacagagactttttcattttcattaatctgcgcctcggcgcgtttgaaaaaatcaacttcttctgtttcagaaatcattttcgcaaggttcctggcctgctgtacaatgtctttcttagagtaaagcgtcattattatttcacctcgattgcttctcctgccatcacaccgtcaagcgaccatgttttcgcctgttcgattttgacgcgtacaatcttgccgatggcgtctttcggccctttgaagttgacgagcttgcttttttccgtatagccggcaagaatgtcagggttatttttgctttctccctcaactaatacttcgacagtccggccttcatattccttcatttttttggcggaaatttctttcaccaaatcattgaggcgctgaagacgttctttcttgaccctcatcggaacgttgtctttcatcttcgccgcaggcgtgccttcacgaggagagtaaataaacgtatacgcgctgtcaaattccacttcacgatataaagaaagggtttcctcaaactgttcatcggtttcattcgggaaaccgacaatgatatcggtagtgagtgaagcgttcggcatcgccgctttaatttttccgacaagctccagatagcgttctctgtcatatttgcgcgccatcatttttaacatggccgagcttcctgattgaaccggaagatggatatggtcaagcaggttgccgcctttggcgagcacttcgatcagatggtcatcaaagtcacgcggatggcttgtcgtgaaacggattctcggaatatcaattttacgcagttcgtccattaaatcaccgagtccgtacgttatgtcctcaaaatcttttccgtacgcattaacgttttgaccgagcagcgtgatttctttataaccttcgcttgcaagtcttctgacttcctggataatttcttcaggacggcggcttcgttcttttccgcgggtatacggcacgatgcagtatgtgcagaatttatcacagccgtacatgatgttgacccagcccttaattttgccgttgcggaccttcggaaggttttcaatgacatccccttccttcgaccacacttcaatcaccatctcttttgataagtatgcctctgataacagttccggcagacggtgaatgttgtgcgtgccgaaaatcatatcgacaaacgggtgcttcttaaggatgcggtttacgactgattcttcttgtgacatacagccgcatacgcccagaatcaggtccgggttattttttttgagcgcttttaaatggccgagttcgccgaacactttgttttcagcattttcccggatggcgcaggtgtttaataaaatgacattcgcatcatcaactgaatttgtcgcttcatatccaagcgccataaaaatacctgccatgacttccgtatcatgctcattcatctgacatccgtaagtgcggatataaaacttcctgccttccccgaggcctttaaattcttctgagattttaaaatcgttatgatattgaacggattctttgccccgttttttcgcatcttttaatgaaggcggaatatatacggcttcgaaatacttgctgtaatccttttcggattttttgtccgctggatttacttgtccgctttcctgcttttgcttttcattcatgttcgaatgtctcctttcaaccgaaacttccaccctcaagtatactggttaaaagcatttggcacaaccgccagcctattattgtacaccttattgagaataagaatcaataagaaataaaaaagagggaatcatttccctcttacacaagctgcagctcttttgcggcggaacggattacttcaagcgcccggtcaagctcctcttttgtatgctccgccgtaataatggtgcggattctcgcttttccttgggcgaccgtcggatacacgatgctttgagcaaaaacgccgcgggtcaataaaaggtctgataatctctgggctttttcttcctcacctattaatatcggcacgatcggcgtttcgctttttgtaagggtcagccccatttgaaccagtttgtctttgaaatacgccgtgttgtcccaaagcttttccatatgctccagctcttccagcaggacgtcaatggcttctatgcatgcggccgtcaccgcaggcggatgggaggtgctgaataagaaaggacgtcctttatggcgcaggtaatcgattagaaccttggaccctgcggcatatccgccaagcactccgatggctttgcttaatgtgcccacctgaatatggactcttccgtcaagcccgaagtgattaaccgttcctctcccgtttttcccgagtaccccggaagcatgcgcatcgtcgaccattacaaaagcatcgtacgcctctgcaagtttgacgatgtcaggaagaggagcgatgttgccgtccattgagaaaacgccgtccgtgacgatcaggcgcatgtggtaattcattgattttttcagcaccctttccagatcgtccatatcgacatggcggtacaccttcttatctgcttttgtcagcctgatcccgtcaatgatggaagcgtggttcagttcgtcagatataacgatatcctcttttgtcagaatgcttgataggacgccttggttcgttgtaaaacccgattgaaacacaagtgccgcttctgtttttttaaagtttgccagctttttctccagctcattgtgcatcgtaaatgttccggcgattgtccggacggaccccgtgcccgctccgaattcctccgcggcgcgttttgccgcttcgacaagtcttggatgcgacgtcaaaccgagataattgttcgatgaaagctgaatcacgttttcccctttgactgccaccgacggcccctgcctcgtttcaatttgcttcatttcctgccatgttttattttctttcattttatcaagctctgcttttagatattcaaattctttcattgtagaaccctccccttatggaatcagaatgactttgccgcactggccctttctcatcaggtcaaaccctttttcaaattcttcaagcggaaactgatgggtgatcaccggcgtcagatcaacaaggccggattcaagcagatgcgatacctgccgccatgtttcaaacatttttctgcctgtgatcccttggacagtgagacctttaaacaccacgtcatttgtcaggtcaatcgtcaccggatgttccggcagactcagcatatggaatcttcccccgttggccgccatctttaatccttgtgttatggctgccgggtggcctgacatttcgcagacaaggtctatcccttctccgcccgttaaggtgtcaatgacttcaagcggatcttctttgtcagctgaaatggtgattgtggctcccaatttctttgcaagagccagcctgtaatcatttttatcaatggccgcaatgcgggatgcgccggctgccttagccaccgccaccgccatcagtccgatcggcccgcagccgataattgcggcggaaccgcctgccagatggctgttttccagcaccgtgtgaacagcgttgccaagcggctcttgaacagaggcgacggcagggtccatgtcagcggggtttttccaaatgttttgagccggcactttgacatattcagcgaatgacccggctgtatctacgccaaggatctttgtatgagtgcacacatgatgttttcctgttaaacaggggacacaagttccgcagacgaagtgggtttccgccgatacatagtcacctattttgacatttgtgacgtgcttacccgtttctgctacgataccgctgaattcatgtccgaatacttgaggtgttttgattcgctcctgcgcccattggtcccaattataaatgtgaacatctgtaccgcatatagatgcggcctgtactttaatgagaacttcattctcattaatggaaggtatgggaatttctttcagagttgctccgaaagcgttttcatttttaacgatagctttcatctttcctcccaacatgtacactcctcctcaaaaaaacactgtaataactggattgtaacatggtatcagaaggaggtaaataccagcgtccacctgataaaaacaattgcttccgtccgaaaaaatgggcgggattttttttgaatattatatgaataaagtcgtttatcatctcttcgtactattaatataatattgtgagaaaatctgacagcaataaaaacaacctgctcgccttacgcaagcaggttgagaatgtacatgttttgttttaacggggctcgacgattaacttaatcgccgttctttcttctccgtcaatctgtatatctgtaaaagccggaatacaaatcaaatctacgccgcttggcgcgacaaagcctctggcaatcgcaaccgctttaacagcctggtttaaggcacccgccccaattgcttgaatttcggcggctccgcgttctctcaatacgccggcaagcgcgcctgctactgaatttggacttgattttgctgaaacttttaagatttccatttctgctcccccttagttttacaatggataagtgagtgttcattagaacaatcattattagatgttgctatccaaaaagccatccccacaatgcttttcaaaaatagcgggctaccttccatttctactatattcactaagaagttgctatattcctgcttttccttttaatatttttataaaataaacacatgatcacctattcaaagaacatatggtcatcattgattaaaatccgttcgatatttacggcttttttcgtctgatcgtcgatgtcgatgagcaccccgctcagcgttgttttcccttccgcaacggtaaaacggaccggaagattggttttaaaccgcttaatgaccgtttctctgtccataccgagaattccatcatacggacccgtcatgcctacatcagtaatatatgccgttcctttcggcaaaatgcggttatctgccgtttgtacgtgtgtatgcgtgcctacaacggctgaggctcttccgtctgtgtaccagccgagcgcaattttttcgcttgtcgcttcagcgtgaaaatcaataaaaatgtacggcgtgcgttttttcgcttcttctattagttcatctgctttagcaaacggatcatcaagcggcggaagaaacgtccgcccctgtaaattaatgacggcaagctcttttccgttcgatttaatataagtaatgcctttgcccggtgtgccttccgggaaattcgccggccggacaagatgcggcacatcatcaataaagtcaaagatctcttttttatcccacgtatggtttcccatagtaatggcgtcggctcctgcttccatcaggctatggtagatcttttccgtcagtccttttccgtgtgctgcattttctccgttaataatcgtaaaatgcggcttatgttttgctttcaatttcgggacatattcttttaccatatcgcggcccggagaaccgacaacatcgccgataaataaaattctcataaattccattcctttcttttctggagactcaaaaaaataaagtgatgcgctaagcatcactttattttgcatactctacggcccgagtttctcttatcacggtcactttaatgtggcccggataatcaagctcgtcctcaattcgtttacggatatcacgcgccaaacgatgggcttccaaatcattaatggaatccggtttcaccatgatgcgaacttcacggccggcctgaattgcaaatgatttttcaacaccttcgtaagactcggagatttcttcaagcttttcaagtctgcggatatagttttcgagcgtttcacttctcgcacccggtcttgcggctgacagtgcatcagctgcagcgaccagaacggcgataatggaagtcggctcttcgtctccgtggtgtgacgcaatactgttaatgacgactggatgctctttatatttggtcgcaagctccactccgatttccacgtggcttccttccacttcatggtcaattgcttttccgatgtcatgcagaagacctgcccgcttagcaagctttgcatcttctcctagctcggaagccattaaaccggctaaaaacgcaacttccattgaatgtttcagtacgttctgcccatagcttgtacggaatttcaaccggccgagaatcttgatcagatccggatggagtccgtgaacgccgacttcaaatgtggtctgctcacccatttcccggatatagtcatcaacctcgcggcgggatttttcaaccatttcttcaatacgagccgggtgaatacggccatcctgaacgagtttatcaagagcgattcttgccgtctcccgtctgatcggatcaaatccggaaagaatgactgcttcaggtgtgtcatcaataatcaggtcaatacctgtaagcgtttcaagcgtacggatgttacgcccttcacggccgatgatacgtcctttcatctcatcattcggaagattgacgaccgataccgtcgtttcggcaacatgatctgctgcacagcgctgcaaagcaagcgacaaaatgtttttcgcctttttgtctgcctcttctttcgcacggttttcggtttcttttgtcatgatggcgatatcatgtgaaagctcattttcaacccggtcaagaatgatttgtttcgcttcatcccgtgtcaggctcgaaatgcgttcgagttctgactgctgcatacgaatcatctcatccactttgctttccatctcttcaatatgttgttgtcgttcattcagagaatgatctttcttctccaacatcgcttcccgtttatcaattccttcatgtttacggtcaagattttcttctttttgaagtaaacggttttcttgtttttgaagctcatttcgtctttcacgaacttcctgttcagcatctattcgaagtgtatggatttcgtcctttgcttcaagcagagcttcttttttcagtgcttcagcatcacgctttgcatcttcaaggatttgctcggcagcaccgcgtgcgcccgcaatctttgcttcggcaatggttttacgaacatagtagccaacaactaaaccgagcagagtcagcaaaatggagatgagaaccgtcattggggtcatactttcacctcctcttgctatgaacttggttgttgcttaaataagtgccggcatgtacattgtctgattttctcaacatacagaaccttcacagggaatgagtctttcatgcccttgtcaagtttaaatggtttaacaatcatgttaaaaaacaaatgttacaacttcattgtaattgtgtcggaaatacttgtcaagcttgccagcttaacgattcgccttcatctcggaatcttcgccatgtatatatcataccataccttcagctgcttttcgtgaatggcggctcgttagttcgcctggttaagcaattggtaaattctgttgttcacctgccctaatttggcgttattctgaatatttgacaataaaatgacatatttgcttgccgaatggctgaagctgttcaagatgttgtaaccgggcattacgccgtgattggaatagcttcccggatcaatgtaaaatcccatgccgtaagcggaactgcttcctgctgtgaacatttttgtaaagctttcttttgaaaggagcgtgccgtttacgaccgctttatcaaatttgtaaagatcttcagcgctcatatacatatcgcccgccccgtagagctgcgataagtccaaaaggtgaggcgtgacaagccggccgctctcatcaactttgtagccgacagccggatatttggcttcagcaaaagttttgtaaaatccggcatgcttcattccggccggtttaaacacatggtctttaatatattgttcgtatgactccccgctgacctgagatacgatataggcgagcactgaataattggaatccctgtactcccaaaccccaggctgccgtttaattccgcggtattctatatccttgattaaatcaataggagaaatcggtccctgtccctcaatatgtccgtttattcctgacgtatgattgagcaggtttttcagtgtaatgcgcgtgccgttaggaaaattcggcaagtatgtactgacggtgtcactcgtctgaagcagccctttttcttcaagctgcaagacagccgtcgcgattaacgctttttgtgaagaaccaacataatatgatgtctccggattgttcttaattttttgttttcggtccgcatagccaaaaccttttttcagcacaacctttccatcttttacgaccattgctgtgccactgaacccgatctgttgcaagtaattgctgatctgtttattgtgatcgattgatttaggtgttttctctttttgcgtcttttcttttttttgttgagtctggtcttttgaagaatcagattgagcagcgggagcgcttttaacggattccttctcccggtgatgcgctgtgacggtccagatcataataaaaacagtgacaagcagcagaaaaagaaacagccctcccgttttcatcaactttttctttctatgtttattaattcttgtgcggcgggggctcgtcatcttttttcctcctcagatataatttcaactttcgccatgatgttagacgagtgaagggtgaaaaaagttgtaacatttcagataaaattttccgaaacagccagtgttttttgaaacacacaaaaaaagagcggaaattgcttattccgctctttttatcgtgcttttattcttcgaattcaagctcttcctgaacttcttccgctttttccgtaacaccgttattgtccaaaccgtaatgttcacggatttgttcttgaatcatcagcatgatgtctttattttcttttaagaactgcttggcgttttcacggccctgtccgaggcgttcttcttcataagaataccacgagccgcttttctgcacgatatcaagttcagttccaaggtcgatgatttccccttctttggagattccttcaccgtacataatgtccacttcagccgtacggaacggaggagcgactttgttttttacgactttaattctcgttttattccccataacgtcgttgccctgctttaattgctcggcacggcgcacttcaagacgcacggaagaatagaatttcagcgcgcggccgcccggtgtcgtctccggatttccgaacataacgccgactttttcacgaatctggttaataaagattgcgattgttttagatttattgatggcgccggaaagcttacggagcgcctgagacatgagacgcgcctgtaaaccgacgtgtgaatcacccatgtcaccttcaatttcagcttttggaacaagcgccgcaacagagtcaacgactacgatatcgacagctccgcttcgcaccagcgcttcagcaatctccagcgcctgctctcccgtatccggctgagaaagcagcagctcttcgatattgacaccgagcttttgcgcgtacacaggatcaagagcatgctcggcatcaataaatgctgcctgtccgcctttttcctgaacctcagcgattgcgtgaagcgctacagtcgttttacctgagctttcaggtccgtatacttcaataatccgtccgcgcgggtatccgcctattccgagagcggtatcaagtgcaagggaaccgctcggcaccgttgaaattcttgtatccgttttttctccgagcttcatgatggaacctttgccgaattgtttttctatttgcttaagagccatatctaaggctgcctgacgatcactcatttatttttttcctcctttatcttgccactacatatactataccttgtttactgacatttgccaagaaaaaagcgaacgcatattcggattttttccgcgttcgcttttcttaaaaagagcattattccccttgtaaaacttaaaaatcagagaaaacgtctctttaaaactttatttttgatccagcattttcaaaataagatggcagccgtatttagcggcgcgctttctgactccggttcttgagccggcaaagttaaattcgtgcacctcttctttgccttcagcggaaataccgataaagacgaggcccggggcatgcccttcctgcggatcagggcccgcaacaccggtaaagctgatgccgatatcgcttccggtcagctttcttacaccggcggcaagctctttcgcgcactctttgctgaccgctccgctttctgcgagcgtttcagctttcacgccgagcacattttgtttcacgctgtcggaatagcagacaacgccccccgcaaatagttgagaagcgccgcttaaatcagtcacccactctgaaaacaggccgccggtaaagctttcggcagaggaaatcgtgattccgttttgtctgcatgcttttgaaagctccttcaccagcgacgtatcatcatatccgtagaaaaattcaccgacacgttccaaaatggcggcttccgtttcttttaaaagccgctcggtttctttttcgtcggcatgttttgccgttaaacgcagcgtgacctcgccgtcggcagcaagcggcgcaatcgtcgggttcgtctgcgcatcaatgatatcttctaagtcagcttcaagctgcgattcaccgattccgaaaaaccgcagcacggttgaaacgatcttctcatttgaaccgagctttttaagaagcagcggcttcccttcattttcaaacatcggacgcagctcgctcggcggcccagggagcagcatataaagtcttgagccgtgctctgcaagcattcccggcgccatgccgaaatgattcgccaaaacgtctgagccctcaatgacgagtgcctgtttgcggttattcggcgacattgtccgttttgttttcgcaaaatactcttcaatcgaccggaacgcttcgtcattcagaacgagcgggcgccccaaagtgtttgcaatggtttcttttgttaaatcgtccttggtcggtccgagcccgccagaaaaaataatcaggtctgagcgctcttccgcaatgcggatgacttgcttaagccgctccggattgtctccgacagcggtatgataaaacacatttacaccgatttccgccagctctttactgataaactgcgcattcgtattggcgatctggccgagcagaagctctgagccgactgcaatgatttccgctttttttgctatttccatctttacgtccttctttctcagttagatgtttttaacgcatcccagttcttcgcaaaataatcccagccggaaatgactgtgaagagcacggccacccataaagcgatatcgccgaatgggaaagaaacgagctcaaacggaagattatgaagcaaaagcgcggcaacagcgatgatctgggcccatgttttaattttccccagcatattggcggctacgacttctcccgttcctgccaggacaagccttaaccccgttacggcaaattcgcggctgatgatgacgatgaccatccacgccggcgcaaggtcaaactgcacaagcgtaattaatgccgcggacaccagcagtttgtcagccagcggatctaaaaattttccgaagtttgtcacgaggttcagctttctggcgtagtagccatccacccagtcagtcgttgatgcaataataaacaaaacagctcccgcaagatgtgcgaccggaatcgattcatctcctatatgaaggctgccccattgaaaaggaacaagcatgataatcataaatacaggaattaaagcgattcttgccagtgtgattttattcggtaagttaaacataaagcccctccaatatatgtactcggacgtgaagaaaaagtcatcttaatcgttcagatgactttttccccttttattttttcatcttgattgtgattgtctgcgccatcacatcatgcggattgagttcataagacagaacctctccgttgattttaattttcaggttaggggcatagcccgtgcgtatttcaatctgcttttgatccgtgatgtcttttttataggtttcacctttttgcagcgttccttcttttaaagaaccgccgctgtcatcacggacgcgtatccatgcgttatctgaagcaatcagttcaagcttgtacttatcagccccggaaacgtcgtatgaagaagcggatccttccgttccggccgctttgatctctgttttttcactgcttttttctttctttttctgctctggctcttttgtgtcctttttgctgtcagtttgcgtgtcatttgtattgccgtcatttttcagcgcggaatccttaggaatctcatacttgctctcgctttgggtggcggccttatccccgtctgtctgcccggacttgctcattccgagctgaataatcgcatacacgatcgcaatgacgataatgacaccgatgacaataaggacggtcggaagccattctgccgcctttgaagcggacttaggcagttccctttgcatggcgaggccggagattttttccgacacatcgtcatgatacgtgttagggatgtcttttttatattcttcaaataattggtctgaatcaagcccgacagcctcagcgtattgcttgataaacgcccgtacataaaaattgccgggaatgacgtcataagagccttcttccagagcggttaagtatcttttctgaattttggtcgccgcctggagttcatccaatgacatccctttttcctctctggcttctttaagccggattgctaattctgtcacaacaaacaccttccaatattaaaaatcaaagcttgaaaaaccggcctgatcaaacatttgcggttcttctgcatgttcatatgtaatgacttcatcaggatcatttctgagttcgataatataatcgaaatcatcgagcgtatactccgtattctgcacaaaaatatcggggtgctccacgacctttgtcgccggaagcctcataatttcactgacgagctgaagatggcgctcagatccgcgtcttgtcgaaacgatgccatcgaggataaacacgttttccgtgctgtattcatcagcaaccagctggctccggatcgtttgttttaacagcgttgatgatacgaaaagccatcttttgctggcacagacgcttgacgcaacgatggactccgtttttccgacccgcggcattccccggattccgatcagtttgtgtccttcttttttaaacagctcggccataaagtcaaccaaaagaccaagctcgtccctttcaaaacggaaggtttttttgtcatcggcatcacgctgaatgtatcttccgtggcggactgcgagacggtcgcgaagcctcggttctctcagcttcgttactttaatggtctccattgtttttaaaattgattccagtcgtttaatttgatctatatgccggcatctgagcagcattccccttctggaaaggtcgacaccgttaattgtgacaatattaattgacagcatcccgagaagagatgaaatatccccgagcaggccggggcggttcacttgaatttcatattcaaaataccattcgagctttgccaaatgatataccccctccattgtggcaaatttttaccttcctttatcataaaacatttttctctaattagaaagaagaatgttgctctatagaggaaaacataaaaaaagagaggagaaatcccccctcttaatgagtgctgttattttcaacaagcttcaccatcatatttgcgatggcgcgctgttcatcttcagaagcaacgctccaaagatcagcaagcactttttcctgatggtttttcgagtcgacttcgtttgcaaggtaaccgccgatttctgtagcgaggtcagtgatcgtttcatcactcatccctttttcctgtgcatagttcaatctgtcgccaaggaaattcttccaattatcccagttttctaatactgacatgttggcttcctccatttcatctgttgttacaaaattattttgtccgtgcagatgtaaactatacatacatttttttcagcagtgccagccgccgtttacggataatatatgccccgtaatataagaggccttgtccgacaataaaaaggccgccgcttcggcgatttcctccggccttgccagcctgcccgcgggaatttcctctgctaatgcttctttttcatcagacgtgaactgatcaagcatattcgtatcaacggcgcccggtgagactgcattcacccggacgccgctcggagcaagctccttggcaagcgctttgacgaacgaatgttgcgctcctttaaccatgctgtataatacttcgcacgacgcgcctgtttcaccccagacggagccgatcgcgacgatgcccccgctttttttccggatcatgccgggcaccagattacgcgccagaagaaaggggctcgtcacatgcagctgaaccatctcccgcgccgtgtcatccgtaacgtccgtaatcaggccgaaatgacttttgccgctgtttaatatcagagcgtccacaggctgtttgacggagcggctgagtgttttcgcgccgtctggtgaggacagatccgcctgaataacggaagcttttactccgaatgatgcgctcagtctttccgcaagcccggctgctgcttctttattagaatgataatgcaaaagtacgtcatatccgttttttgcgaggacttcgcttatactttgtccgattccgccgcttgctccggttacaagcgctgtctgtttcatcaatcaacattccttctttccccagaaaaacatccctcagggcgcgagggatgttttgttatgatttcggcacgactttgcagactgtcagcctgtcttctgatatttcttctttgatgacccgctccacgtcttccggcgtaatctgctccaatacggttacgacatcaaacagactcatgtctaaaaaggcgtagcgtgtgaattggttggcgatatattcaggcgaattcagcgcttttaaaaatgacccgatcttcttttttctcgccaggtcaagtttttcctcggtcacggcagatcctgcatcaagcagcatctgttttaattcgtcagcgagcttatccggctccggtgtatctcctccgacagaggcaaaaccgaatccgtattcagccgtataatcaaagctgaaggtttcatcaatgtagcctttgtcgtataggtcgccgtaatgcggtgagctttttccgaaaagacactcaagcatgaggttcatgctgagctcgtgcttcaatagctcccgtcccgttttatatgggtctttcgcctttaggccaaccagacattttgagccttggacgttcatttttaattcctgctcccggcggaaaaccgcttcctgctcccgaacttcttcacgtttgatttcaggctgatctgtaaacggctttttctcctggtttttccgcacctggctgatgatcgcttcaggatctacagggccgacgataaagagcagcatattgctcggatgataaaacgtttcgtagcactcatacagaagatctttcgtaatatgagagatgctttccaccgttccggcaatgtcaattttcacagggtggtctttatacatattttcgatgaggccgaaaaacagccgccaatccggattatcatcatacatgttaatttcttggccgatgatgcctttttctttttccactgatttttccgtgaaatacgggtcctggacaaaatccacgagcgtttccaggttttgctctacatttgaggtactggagaacagataagcggttcgtgtaaatgacgtaaaggcatttgccgatgccccctgcttgctgaagtcctgaaacacgtcgccgtccgctttttcaaacagtttatgctcaagaaaatgcgcgattccgtcagggacgtgaaccatttcttccttttttaaaggaacgaattgattgtcaatggaaccgtactttgtcgtaaacacggcgtatgttttattaaagccctgtttcggcagcacatagacatcaaggccgtttgccattttttcatgatacagcgtttcttgaagctgttcgaagtttatcggtttagtcaagatgctccccccgtcccttttaagaaataagtcgtatccagcttaatgttctttccgacattgacaatgtcctcttttgtcactttctcaatattgtcaaggaatgtttcgatcggtatctccacttgggctgaggcctgctggtacagaaattccgctaagccgtatgccgtatcgatcgtttctaatacttggtttttaataacggcttttgtctgggcgatatcgtcttctgaaaagtcaccgttctgcatcgcctgaaactgttcttcaataatggtgacggcctgcttgtaatttttcacttcaatacccgacatgaccatcaagagccctttgaagctttccacccttgaggctgcataatatgcgagactcgctttttcacggacattcataaacagttttgaatgagagaaacctccaaagagcccgttaaacacttgcaatgcaggatagtccgggtctgtgtatgtcgtattggtccggaatccgatattcagcttgccctgtttgacgtcctcttcatcaataacttccttcggatcaggctgttcattcgccatgcttctttctaaaggctgctgcgcccgttcgtccgttttaaaatacgtatcaacggctgttttcacctgatctgtgtcaacgtcgccgatgacatacaggtccagctgatcttcgcgtatggctttttgataggcttcatacaggtcttccggagtaatgtgttcaacatcatcgaactcaccgttgacgtgaagggcatatggttcgcttttgcacatttcctgaacgagacgaagattagaatatctcatcttatcgtcatatacggcttgaatccgctgtttcagggtccgtttttcctgcgtgacataaaggggcaggaaggcgccgttttccaaagcaggcgaaaagacaagctctgataaaagctgaagacctttttccaataacggtgtgcggtccttcagatacttttcattgggaatctcaagccggaacgtaataacatgacgttctcccttttttgtcaaatcagcggaaacggatgtgccgtacagttcatcaaaataagaacgcaaatcagccgttttcggccggctttctgtcccgcggagaagcacatgcggaaacagcgccctttttgttacaagctctttcgttaaaggagccagcattttaaacgtcagtgaaacggttttaaatttttcagtctttacgatgtgggcggtgattccgccgtgttttgacttcatttcatttacgtaagtcatgtgaaacctccttcgttcattctttcatattatgtattatgaccaaatttcagcattcgcaaaaaagagtgcgcagatgtaattatatcaactggaggatttataaggaaacaaaaaacctctgcccgaaaaccaggcagaggcattgtacgttattttttcaaattgaaaggccaccagttggctcttccgaatattttcaccatgaccggtacaaaaaacggaaggacaacaattgcgtacatgagaaggccggttaataccacggttgcgatctgcaaaagggaaagaacgcctgacggcagcatggccgcaaaggttcccgctaaaataattgccgcagaaatgatgactgagcccatatttttcatactgctgatcattgccgcttccgttccttcttttttcagctcattaaaacggtccatcaggaagatggaataatccacgcccagagccatcagaatgacaaagccgaagaacggcacggcccagttcacccccggatacccgaaaaagtgtgtaaagatgtactccgtcacgccgatggatgcgaaatacgtcaggacgagcgaagccactaaataaacaggcataatgagggaacgcagcatgacgatgagaatcagaaaaatgcccgccagcataaacatcgccgtccgtttgaagtctgaatccgatacttcttttaaatcggcattcatgctcgagaccccggagacgccgaaagaggcattcttcaaatccgtattcggaatgaccctttttacgctcgctttgatcgcttgaatatcttgaatggccgtatttgaataaggattgttatcaagaacgacggtcaattctgtcgtttttctgtcttctgacatgtacgtattaaacacgcttttgaaatcactgcttttcaatgcgtcttgcggcacgaaccagcccgccatttctttgtctgacgccttatgaagttcacccagataatcattcgcccccatcatgccgcttgaaaccttcttaagcccttttacactatcgttaagcccggaagaaagatcactgagctgggaagaaaaatcaccgaggccgctttgcatttttttctggccctccgcaagctgtcctgccgccgattcaagacgcggcatttgtccggcgagagccccctgtccgtctgatacttgctgaaggccgttttcaattctggtcaggccgttgatcattgcgttaatttgagtgtcaatcttctgttgagcggctgacagccgggcaaattgtttttccgcttgctgcagattatccttttgactgtcgacctgtttagaaaacgcttctgcgtctgcatttgctttggaaacggctgactgaacgcttgtaaaagccgatttgatctcttgataggagggatcggtttttactgccggtaccgacgcttccaattttgcaaacggcagccggtcaagctgcttgttcagatcggcaagctgcctgctggcttcatttttcatcggcagaagggtttttaccagttttaaagcgttttgcgtttctgatgcgagaccgctgctttgactgagctgcgcagacagcatttgtttctgctcttcaatctgctttctcatttgagcgacaccggctttattcttgttcacgccagcctgcagcttattcaggttctctcctatatcagaaagcccggatttcagagacaatgtcccgtcaataagctgattgacgcttttccccgactcttcgatctgcggctgtgaatcagctaacgactttgcggcattccctaatccgtctgttattttttcaagccctgtattgcctttgcctagaccttcttggagctgttttgcctgatttgtgacaaataattgattcaatccgttccctgtagggcgcgtggcgcttctgaccgttttcacaccctctgtcttttcaagttccctgctgattttttcgatatcaatcaggtgtttttcggtatttaatgcctcgtcattttttatgacgactgttgccggaagaagttctcccggtccgaatgcatctgaaatcgtattgaaggcgcggacggattcatatttatccccgatctcgtcaaggctgttgtaagatagcgcgcctttgtaaagaaggatcggcgggacggtaaataccgcgacgattgccagactgataagcggccgcttaaacgagaacgttcctgctgtttcccatgctttgctttgaggatgggaaatatcgcctctgacaggccaaaacaacctttttcctaaaacagccataaaaaacggcacaatcgtcatgagtgcaagcagcagcactgcgacaccgactgcaacggcggctgccgactgatacagcttaaatgtcgcaaatccgatgcaggcaaatccgatcagcaccgctccgccgctgtacaaaaccgtctttccggccgttttgtaggtcacaacgatcgcttctctaatatcagcgccgtgagacagttcttctttaaaccggctgagaagcagaatgcagtagtctgtgccgattccgaacataatcgcaaccataaaaatctgagtaaaggttgaaagcggaaaatccagctgatcgactaaaaaagcgacaatggattggctgactaaataagagattaatactgataatagcggcacaaacggcgcgaccactgaccggaatacaaggatcagcacgatcaggataaaggcaaccgttatatattcagtctttttcaagccgtcctgagagctttttaacacatcttcgtcaatcagcgactggcctgtaatgccgtatgatacgccgtacggtttgagctctttatcaattttattttttattgcaatgatattgttttttgatgtatcaagctgcagctgaacaagcatcgtttgtttgtcttttgacagcagctgttttttgatgtcgtcatttttttccccgaaatatgaggtcaccgttttaatatgaagcgcttctttatgttcagacaaagtgctgacggctttctgtaaacgatcttttttgtctgtcattaagcctttttcgtgaaagacgatgacggcggaagaagacggtgcatctgaatcagacatgtcatcaatcagtttgcgggcgtctgaagaggaatatccgtccggtacggaaatctggcctttctcccgtgtcaattcagccatatcaggcgctgtaagcataaatatcaccgttgcggcgatccatgccgcggcgatgatccagcgggcttggataatttttttcattatgtctgctgatcctcctctgccatcatcaatctgtataatttttcgtatgtattaacgaacatttccgcctcgtcttcatcaaaatacataatatatgaacggacgagatcctcaatccgccgctccacacggtgaaatacttccgtccccttttccgtgacgtttaacaggatgctccggcggtcgctttggctccgttctcttttgatgtatcctttttcatgcaggcggttcgtcatagaggtaatggcgcttttgttgacgtggcacacggcggcaagttcaattgatttgcaatcgggattgagcataatatagcggagtatgtaatattgatccaatgtaagctctttgttcactttctcggcgataatgctgtcaattttttttaagacgtgcaggtatacatcagaataacgctgaatcagctgttttactttttcttcgtgcactcttttccccctcctttaatagttaatatgtttaactattaaaggataacgagcagacggtatcatgtcaatattcaaaataaaataaaaaaagacagtgcagattacaccgtctttaatgattcctttttttcttttgcttgagaagagatatttaacagcgctaagaatactgatacaatgccgcaaaaagcggataaaataaaaatcagccagcccgcatttgacatcagcgcagcaaatattggcggtcccgccgctactccgataaaccgcatgctgttataaaatgaggtgatggttcccgattcttcgttgtttacaccttctgtgatgacagcgtctaaagccggtaatgccattccgattccgataccgctgacacacaagaagataaataataaataaaaactgtgattccaccacaggccgataaatgacagtgtcacggcactcattccgaaaacgatgcaaaacttcattttgccttggtctttcccgatttttctgcctgatatatatgaactgacggatagaaataaaagcgggattgccaaaagcgctcctttagccacaccgtcaattccgtatttcttctccagcgagtctgataaataaaacagaaccccgaacagcaaaaacataatcacgcagccgataataaacaccgtaaagagccagcgtccgtcacgcttaaatatgcggcccacatttttcacaaattcagaaatagaaggcgcttctttttgttcctccggctttgccaccaaaaacaaaacgagaaaaaaactgatgagcgaaaaaaacggaatgaaccaaaatggcataaaccaaaaccaagcggccaagagcgacccgataatcgggcttaatactttcccggcggtgttagacgtctcaatgtcgccgagccccgcggtaatccgctcatcatcccccttgaacaaatcaccgataaacggcatcaccacaggagccgcccctgccgaaccgattccctgaagcacccgtcccgccaagataatgggatatggatgcttgaacgcggtggaagctattgcggcaagcgcaccgcccgcaccggctatgagaagacaaggcagaagaaccttttttcttccgaatttatcggacagatatccggcaatcggaatacaaataatcgccacaatcgaatagaccgttataattaacgatacttgaaaagacgatatggacagcttcttttcaatcatcggaagcactggaatcagcatggaattcccgagtgtcatgacgagcggtacagaagccaaagcaatgatatttttcgttccatttttcttcttactcaacttattcacccattcactatacttggttgtttcctgttttattgtgccttgcggcaaacaaagtatgtacgaacggcgcaaataaaaaaacagacacatgacgcgtctgttttaaaaacgttttcttacaacatgaaagcggaacttatcagcgcggaaataatttaatgaatataatacaggttcatcatgctgattatagtgggtttgtttcaataataaaagcgacgtctccggctcacattccaaaacgggtgaaatcgtatcgtgatatccgatcggttcaatatcagcaacggcatagctgatcaccgatcccgagtttttttccaagagatcaaaaatggactcctgttcatgacagaaagaattcggcagaatgtccatcggaatcgtatctaaacagtaaacgaccggagtgccgcttgccgttctcacgcgctccaaataaaaaagctcctgctcaggctcaagccggaatcttgcaatatcttcatcagacggtgtaatgacctgggacgacaaaaaaatcgtacccggcaccatgttcgcttgctgaatcattttcgtcacgctgttgagctgttcaatacctgaaagaaacagcggttttgtatggacgaaagtgcccacaccgtgccttctgataatcacatgctcctcttcaaggatacgtaaagcttcacgcagagtcgcccggctgacacccatcgattttgaaagctcaaattcagaaggaagcttttccttttcggtgtaaattccgttttttatatcctctttgattcgctcaatcacttttaaatacaagtgacgattgtcagcttttgtagacatgtttcccctccgtaaaccactttcttaaattattgaacaattgggacaactatatcatgttttgataaaaaaataaacagggatgattttgacagtattattttaagtgaaagccctcttctttttaagaagagagctcatcgtattgttcttttgataatagtacttccctcggtttgcttccttcatacggcccgacgacgccccgctcctccattgcgtcaatcagacgggcagccctcgtgtaaccgattctgaaccgtctttgaagcatagagacagaagccgtctgcatgccgataatcaaatcgaccgcttcatcatacagatcatccgttacttcactgtgtgtttccgcagtttcttccggaatcatttcttcttgatactgcgctttttgctgtgtgatgacatgatctacgacatgctcaacctcttcatccgataagaatgccccctgcacccgaaccggcttattcgcgcctacgggcagaaacagcatatctccgcgccccagaagcttttcagcgccgcccatgtctaaaatcgtccgtgaatcggtctgagatgagacactgaaggcgattctcgacgggatgttggctttaatcactccggtaatgacgtcgactgaaggccgctgtgtcgcgataatcaaatgaatgcctgccgcccgtgccatctgggaaagtctcgtaatcgaatcttccacgtcggaagaagcgaccatcatcagatcggcaagctcgtcaacgatcacgacgatgtacggcagctcaggctgctttacttcttctgaggcatttgaccgcttgatatgatcattatagccttctatatttctcgtgcccgtatgggagaacagctcatagcggcgctccatctcattgacgacctttttcaaagcctgtgaggcctttttcggatctgtcacgaccggcgcaagcagatgaggaatgccgttatatacattcagctcaaccattttcgggtcaatcatcatcattttcacttcatgcggtttggctctcatcaggatgctcgtaataattccgttgacacatacgcttttcccgcttcccgttgctcccgctacaagcaggtggggcattttgttcagttcggcaagcacggcttctccggaaatatttcgccccaagccgatcagaagcttcgcatccggcttgtcgttgagcttggattcaagcacttcttttaaggaaaccatcgcaacttcagcattcggcacctcgatgccgattgctgatttgcccggaatcggcgcttctatccggatatctttcgcggccagcgcgagcgcgaggtcatcgctcagattgacgattttgctgactttgaccccgacgtccggatatacttcatattttgtgacggccggaccgagatgaacctgcgtcactttcgcctttacgccgaagctttgaaaggtgcgctcgagttttcttgcattctcgtaaatgtttttcttatctgtctgctggccggtatgtttcgggtcagccagtatgtccaaggaaggcatttgataatccttattttccagctctgtaaacgtcatcggcggagccgcgggcgtttcgtcactgtcttggacgccgccggaaggctcttcttgtgccgcttgtgccgtctcctgcgtcttttcaggaatcagcggctcgtcgcgctgctcctcacgatctgaaaagcttgaaataatcggctctgaatggatgatcggcgaaatgatttcctcatcctcttcctccggttcaggctcttcttttttcttttgaacacgtttttttgttttcgttttcggcgaagacatattcgttctgactgttttcatatcttcaagaaatgcctgccattgcccgcggataaacccgccgacggggctcgtccactttttgagcgtttcctgcaacgaacggcccgttacaagaatcagtcccattaagatcagcacgatcgccataatctgtgaacccgttgatgcaaataaaaagtgggcagctgcaaacagtaccgcgccgatcataccgccccccaagtcaggtgaggcagcctgctgtttcatatcgatcataaacagctcccacgtgttgccgatgacacttgccgactgaatcgacccatgatgggacagatttttaaagagctgtacgtgagacagcagcaaaatactggcgataatacagtacaatcccgcctttcttctcgttaaaagactcggactcttctttttccaaaacagcgaaattcccagaaggaacagcgccagtaagcataaaataaaccactctccggcaaaaaaacggaacaggtacacaaatgtctgtcccacaacgccgagctgcaaaacagcaataatcgagattgcaacacagagcagtccgcttagctcgtattttatattgagcttactctcttgtttctttttagatttccgttttttctttgccacactcatcaccttactgcgttaaaaaatgtaaaaccatacatcatgaagaaaagcagccttttaccggctgcatttttctgtaggattcccctattatagcatattttgcccctgagaaacggactgaatgccggttagattttcaacttaattttttgtcccggagcgatgtccggattcagaaaatccatcgggttcgtacttagaatctgtacgacttcagcttcatttcccttcatttcaactaacagcggcacaccggcgtaatctacctgttcatgcacgctttgttctgcttcatgaccgtaaacgacttcttggggcatgacggtataaaggatcattgaatcatccttccttcctcgccctttcgttcctcaatcagctgattcagcttttttatcgcctgtccgacgccgccgacggcgtcaattaagccgtaatcagccgcatctttgccgactacgttcgttccgatatcccgggtaaggtttccttttgaaaacatcagttctttgaatttttcttcggaaatattggaatgattggtcacaaagttgacgacccgctcctgcattttgtccaagtattcaaacgtttgcgggacgccgataaccagacctgtcagccgaacggggtgaatggtcattgtcgctgtttccgcgataaagctatgatcacatgacacggcaatcggcacacctatagagtggcctccgccaagtacgattgagacggtgggttttgacaaggatgcgagcatttccgcaatcgcaagacctgcttccacatcgccgccgacggtgtttaaaatgatcagaaggccttcaattttcggattttgctcaatggcgacgatttgcggaatgacgtgttcatatttggttgttttattttgcggcgggagctggacatgcccctcaatttggccgatgattgtcagacagtgaatattggtatcctgagacatttgcggcagagatgtctctcccagctgctgaattttgctcataaggctgtctttcgcatctgatttttcgggctgctgttcttcggtgttttccatacgatgatccattttatttttcaccctttccgaatgtctctttgtattatgaacaaagatgcggatttccatccggagatgaacaaaaacaaaagccgcagcatcatgcgctccggcttttgtgtatattatacttccataatgatcggaatgatcatcggcttgcgttttgttttttcataaaggaattggttcagcgcatcgcgcatggcttgtttcagcgtggaccattccactgcagatgtttccgtcgcttcagtcacgatggagcggacgagctcagtagcttgtacaattaaaccttctgattctctgacatatacgaaaccgcgcgtaatgatttcaggacccgatacgaggttctttttctgcttatcaagcgtaatcacgacgatgagaatgccgtcttgtgacagcaggcggcggtctctcagcacgatgttgccgatgtcgccgacaccgaggccgtcaatcaggacatttccgtatgtgaccttatccccgattttcacattctggccgcggaattcaacgacgtcgcctttttcaattaagaaaatgtcgctgcgtttcatgccgatttcttcagcgattttggaatgcgctttttgcattctgaattcaccgtttaccggaattaaatatttcggttttagcaaattaagcattagttttaattcttcctgtgaaccgtggccggacacatgcacgcgtttttgggcgaaaatgacttgagcgccggcgcggacaagctggttgacggttttggaatataccaattcatgccccgggatcggtgttgatgcaatgacaacggtatctccttcttcaatgttaagctgcttgtgcgcctgcttcgccatccgcgtaagagcggctaacggctcaccatggcttcctgccgtaacaattgccacttcgcgcttcggatattttttcacatcctgcaccggaataaacagttcatcatcggcttcaatatagccgagctttcgtgcaagctgaagtacgttttgcagattttttccggcgattgcaagtttgcggccattctgtgcggcagcctgaatcacttgctggatccggttgatattagacgcgaatacggcaacgatgacgcgattttctgaaatgtacatcgcatcggaaatttcaccgcttacatctgcttctgacggagtgtatcccgggcgctccgcattggcactgtcagaaagcagggcaagcacaccgctgtttccgattttagcgatttcgccaatatcacatgattggtgatatgcaggcgtctggtcaaatttgaagtctcccgtgcatacaatagagccaagtgatgttttgaagctgactcccactgaatccggaatgctgtgaatcgttttaaagaacgatacttttgttgattcaaatgtaatgactgatttagaatgaacttcacgtaaatcagcttttcgattatgcccgtactgcttgagtttttctctcagcaaagcaagcgtaagcttcgttccgtataccggtaccgacagcttgttcaataaataaaagacgcctccgatgttttcatcgtgtccgtgtgtcagaaagatggccttcacgcggtcagcccgttctactaagtaggaaatatccggaatgacgacatcaataccgagcatttcattttcagggtgcatcagccccgcatctactacaaatatgtctgagtcaatttcaatgacatataggttcttcccaatttctccgacaccgccaagggcgataattctgacgttttctgtatttttctttttcaaaatctgtatcctcctagtctcatacccgtccatcatcacttgttcctattataactgatatcaattttagaaaacaagaagaagcggaaggtttagggaaaaccaatatgtagacaaaacggtcaaactcacgataaaaatgagaatgaccgcgtattttaactgtataaatttttcttacagttcgctgatgacgctgctcaggctcagacgttcatcttcattcagcgggataagaggaagacgcacagatccgacatcaagtcccttcagctgaagcgccgttttgaccggagccgggttcggcgctttaaagagctccttcatgatcggcagaagcttctgatgaatcagtgccgcggttgccgtctgcccgttcgtatagtttttaatcatctgctgcatgtcagaacctacgatatggctggccactgacacgacccctcttccgccgactgcaagaataggaagcgttaacccgtcatcacctgaatagacataaaaatcttccggcgtttcggcaatgattttcgtaatggcatcaagatcgccgcttgcttctttaatcgcagagatattcggaatctccgcaagtctgatggccgtttccggcgcaagtgaagcgaccgttctgcccggcacgttgtaaagcataacaggaagagacgtttcttcagctatcgccttaaaatgacggtacatgccctcttgtgaaggcttattataatacggcgtgacaagcatcacacaatcaacgccggcttcttcagctttttttgtcagtttgatggagtctttcgtattgttgcttcccgtacccgcaataacaggcactcgtccgttcacttctttgactgtaaattcaaagagtgcaattttttcttccgttgaaagtgtcggagattcgccggtcgttcctgcgacgactaaagaatccgtgccgtttttcaacaaatagtcgattaatgtagacagtttttgaaagtctacattccctttactgtcaaagggggtaatcatcgctgtagatatatttccgacattcatttttttcacctcatcatgattcaatcacatttactttgaaagttcaaacacttcatgcagcgcatttacggctgttaccatatctttttcatgaacgagcacccagatcgtcgtatggctgtcggcagattgcagaatcggaatgcctttatccgaaagtgctgagacgatttttgacgtcacgcccggcacacccattattccggcaccgaccgctgacactttcgcacagctttccgtcactgtcggctcatagcctaattcggccaaaatgccgcgcgcggcttccgttttactgccggctacggtatatacgatttcactcggcgtaatgttaaagaaatccacgctgatgccggcattcgccattgctttaaagacttctgtctgaacattgtattgccccattttggctggaaccttaaattgcgtcacatcttttacatgggcgatccccgtgatcagccgttcgaacacatcgctgccgaccttggacgaatgatgagacgtcaccaaagtgcctttgtcttttgaataagtggagcgcactcggatcggcacctttgcctgcatggcgatctccaccgcgcgcggatgaatgactttcgctccttgataggcaagattgcagatttccgtatatgtgacattcggaagcggcttagcattttccacgattctcgggtcggccgtcatgacgccttccacgtccgtaaaaatgtcgataaattccgcatcaaccgcagcgccgatcgccgctgctgatgtatcgcttcctcctctgccgatcgtcgtcgtgtcgcctttttcagtcgctccctgaaatcctgcgacaacgacggcatcatggctggcgagtgtctcgaacagccgctctgttttcatttctataattttggcgtcagtatgctgggcgtttgttaaaaaccctgcctgggctcctgttaaagctgcggcttttatgccgttttccttcagcatgctggtaaaaacaacagacgaaatcgtttctccgcaagacaaaagcatatcctgctctctcggagaaatatcggactggctgccgtaaagaagcccgatcaaagaatctgtcgcgtacgggtctccttttcttcccatcgccgatacgacaacgataactttataaccttcactgatggcatctttaatgtgtgctaacgcaagcttgcggcctttgtcatcttttacggatgttccgccgaatttttgaacaatgatcttcactattttcactccaaattagtctgacgtaacagaagagagcaggcagagccttactctcttctgatcgcctatagaaaatacgtttgttttatacgaggttcagtttttgcaggctttccgcaatttgaactgagttccaagcggcgccttttaacaggttatcagaaacaacccacaaatgaaaaccgtttgctctgtccaaatctttacggattcttcctacaaatacatcacgtttaccgacgcaatcagcaggcatcgggtaaagctgctccgccggatcatcctgaagcgtaacacccggagcctcttttaaaagctgtttaatgtcttcaacggttgcgtcatcacggtcaagctcaatgtaaacagattctgagtggcctgtttcaatcggcagtctgacacatgtcgcagccacttccagcttcggcatatgcatgatttttttcgtttcattaatcattttcatttcctcaaacgtgtagccgttatcttggaatttatcaatttgcggaatggcgttaaaagcgatttgatagtgctttttgtcccctttaaccggcataatggacggttctataggttcattgtttaaaatcgcctttgtctggctgtacagctctttcgccgcttcattgccggccccggacacagcttggtaagtagatacaatgacttttttcaaaccgtatgctttgcggatcggttcaatcgccgccaccatctgaatcgttgaacagttagggttggcgataatgccgttatgttgatgcagatcagcttcgttcacctcaggcactacaagcggtgtattttcgtccatacggaatgcgctggtattgtcaatcacgatggctccccgttttacagcctcaggcgccaggctttgtgatacgctcccgccggcgctgaataacgcgatatgaacgccttcgaagctttccggaacagcttcctgcactgtatattcttcgtctttaaacgttactttcgtaccagcagaacgctttgaggatagtagtgtgagtgtttcgatttcaaagtttctgtcttccaatgtttccagcatttgctgtcctacggctcccgtcgctccgacaactgctacgtgtaatcctcttcccatctgtaaaactccttccgccaattaagcatcatttgttgaattgactttgcattttacgttttattttaccatagaatagtcacggattgaccgaatttttttattccggaatgattttctctatcatgattttttattcttgatgctgtacgagcaccggctgaacctgctgatgcaaaagagctttttccaccgtaatcggaaggagatccattctggcgacaagcgatgtcggttttttcacatggtcatcctggccgaacgggatgaaaaatatatgttttgcggacatcagcctcattaaattcgttccgtttaaaccaaggccgtcatttgtcgaaattccgagcacgaccggccggctgttgcggatcgtggctttcgccgccataaggacagggctgtcagtcatcgcatttgcgagcttgctcattgagtttccggttaagggggcgatgaccatgcagtcgagcggaagtttcggcccgagaggctccgcttttacgatggaatcaatgacctcaaaacctgttgcttcttcaatttttctgacccaatcttccccctctccaaagcgcgtatcggtcgattggaccgtcgacgtcacaatcggccggacttcagccccctgactgacaagcgcttctatttgcggaaaaacctcttcatatgtgcaatgagagccggttaatccgaatccgattcttttccctttcaaagacatggctatctcccctctttctttaagtctgccaaaagcttgctcagtacgttcgcaataatctgtcccgctgttttcggagccacaatccccggaagccccggagcaagcagcgctttaatgccttgcttttcagcatatttgaaatccgttccgcccggacgggatgctaaatccaaaatcaaggtcctcggcgtcatacgcgataaaaccctttgattcagaatcaggctcggtacggtgttaatgcagatatcgatatcatttacatgatcagtaatctcttcaatttgaaaaggaaaaagccccatttccgatatacgggccaaatgagacgaactccgcgctcccacttttaccttcgcccctaacgctgcaaacgtccgggcgattgtcataccggtgcgccccatgccgagaacggcgacatttgacccgtgaatggtataatccgtatgctgaatcgccatcatgattgtaccttcgacagtgggaatcgagttgaatatcgcgatgtcgtcccgctcaaataatttaacaagcttgcggccggcttcgctggcgatgccctcgaggtatgcgttagagatgccggaataaataacgcaatgctccggtgtctgctcgagatagctttgctttaataccacttcttcatttgaaaaaaccgtggaaacaacgccttctccggtcgttgccgatacaggcaggatgatactgtctattttcggaaatggaatctcatcaattttgcatttgacggttcccgtaaaaccgtcatccaattggtcaaaccctgcaagataaatatcggcatgctgttctgtcagttttcttataatctcaagctgtcttgcgtcaccgccaatgatcgcaattgtcaatccggttaacatttgaaacgttcaccttctttacagttactggatcttataagtgtcatcctcctcttcatcgtatgtgcgaagagaaagggcggtgaatgtacagcgtttttttcataaaaaaagcaccggctgtttgagccggtgcttgcgaaaaatgaatacggtctactcttctggaggagtgatctccccgggaacatctaaaatgatcatgtctgacccgattttttgaatatgattccagggaacacggatgtcgtggccttgttttctcaacccgaaccattttaccgtcggtatcaacagcgcggtaatttgtccgtcctgttcattaatttccaaatcggtctggccgagcacgccgagtcgctctgcccgtttaatgtctacaatttctttacctgacagttcactgagcctcatgatagccacccccttgtactatatgaccctgagcaaaaaaaaatgcctgccccgtacagaggcagacttcccgcttaagatgaggccggcatattgccggtcggactgatgagcgataatgcgtaatcatccgtaaataagcggcggctcaggccgttgacgctctccaggctgactgcatttaattcagcgataatttcatccatcgtcttatgctttccgagcaggagttcgtttttcccgttccggctcattttgctgtttgtgctttctaagctgagcattaaacttcccttcatttgctctttgctgttttccagttctttcggggtaatgccgtcacgttttagaaccgataacgtttcttgaatggtttcagacagaagcccgagctgattagcgccggtgcctccataaatcgtcagcataccgctgtcttcataggaactgtgatagctgtatacagaataggccagtcctttatcttcacgcacatcctggaaaagacggctgctcatgcttccgcccagcacgttgtttaagacgattaaatcgtagatgtccgggtctccgactttcaggcctttaaaaccgaggcagagatgcgcctgttcggtgtctttttttctggtcagcttttcataatgaaactcaggctggctgataccgcttgccttgccctttgcttcgtatgtaccgaaccatttctccacgtctttaataaattgttctgttacatttccggcgacagaaatgacgacgcggtccggtgtgtaaaagttatccatatgctgtctgagagaatcaccgttaaaagcagaaagcgtttcctccgtcccgagtatcgggtagccgagcgaatgatttccgtatgtcgctttgctcagcagatcgtggacaatgtcatccggcgcgtcttcatacatcttaatttcttcatatacgacgttcttttcttttttgagttcatcttcatcaaaagcagaatgaaagaacatatcggccagcacgtcaagtgcgtagtttgcatgttcatccagcactttggcgtaatagcacgtatattcttttgaagtgaaggcattcacttgaccgcctatccgatcgaaggattctgcgatttcccgtgcggatctcgtatttgttcctttaaaaaacatatgctcaagaaagtgcgaaataccgtttgtatccggcgtttcatggcgtgatcccgttccgatccagacgccgattgccacggaccgcaccgttggattattttcaagcacaactcttacaccgttttggcatgtatagcgttttatcaagtttgttcctcctattcaaagacaggcaaactaccgcctgctacttcatcagcctgttttcatccattaagtcagacactgagccgagcgcatagcctttttctttgatttttgtaatcagcgtttccaggcttttcgcagtcggatcagtcggatgcattaaaatcatggctccgttatgtattttgctcaacacccttgtttgtaaaacagccggagacggtttttgccagtcaatggtgtcaacggtccacatgatggtgcccattcctttttccgccgcaaggtcgaccacggcttttctgaagctgccgcttggcggcgcaaaccatttcggcttcatgccgagcgtctcgctgatttgtgcattggttttgtcaagctgttcggaaatgcttcctgatgtcagtttgctcatatcagggtgattgtatgaatgatttccgatttcatgtccgtctgccgctatttttttcccaagttcctgattgtttttgagccattttccttcaagaaagaaagttgctttgacctgatgctgcttcagaataggcagcatttgctccacgtattcatttccccaagctacatttatcaggaaagcgaccatcggcttgtcgggatttcctttataaatgggttcgggcgcaagagaatcgagatggactttcggttttacctgttcatagacaaggtcatcttcgtgaaattctccatcctttttcatttgcttataggatttttccacattgacctttaaaccgttataaccaggtatcgccttccatattttatcaatcctcgcatcttgcggcttcacttcatactccggcgctttttggagcaattcctcataaagcggatcttttgatgctgacacagtcactgcgtcttttttcattgcgtctatgtaatcaactgtatacgggttttttaacatctcaaacgaaacaaaaaaaagaaataaaaaaacggcaaacggcacgaattttttcaacatgtccttcccccctcatcacacattatgtatgaggaggacaaggtagaacccgctgttgtctttctcaaaataaagaagccgggtctcccaggctccttgttaggttttcatttaagattgttgttgttcttgttctttttctttctcttcgcgcagcactgctttacgcgacaggttgactcgtccctgtttgtcgatttcagttaccttcacaaggatttcgtcaccgattttcacaacatcctcaactttgccgacccgttcgagcgcaagttcagagatgtgaacgagaccgtcttttccgctgaagatttcaacgaaagcgccgaatttctcaatccgcttgactttaccgaggtaaagctggccgacttcgacttctctgacaagatcttcgatgatttttttcgctttttggttgctgctttcatcagtagaagaaataaagatggtgccgtcttgttcaatgtcaattttaacaccggtatcttcaatgattttgttgatttgtttgccgctcggtccgataacgtcacggattttatccggattaattgtcatcgttaagattttcggcgcatattgagaaagttcttttcttgattcaccaagcgtgctgagcatgctgttcaagatttccattcttccttttttcgcctgctgaagcgcttcttcaagaatttctcttgaaaggccttcaattttaatgtccatttgcagcgctgtcacgcctttttccgtgccggctactttaaagtccatgtcaccgagggcatcttccatcccttgaatatccgttaataccgtatagtactcgcctgatttcacaagtcccatcgcgatacccgcaacaggcgctttaatcggaacaccggcgtccatcatggcaagcgtgctcgcgcaaatgctggcctgtgaagtggaaccgtttgattcaagcacttcagatacgagacgaaccgtatacgggaagtctttttcattcggaatgaccggctcaagcgcacgctctccaagagccccgtgaccgatctcacggcgtcccggtccgcgcatcgggcctgtctcccctacgctgaattgcgggaagttataatgatgcataaaccgttttgattcttccacgcctaaaccgtcaagaatctgaacgtcgccaagagcacctaatgtacaaacactgagcgcctgcgtctgtcctctcgtaaacagcccggagccatgcgttctcggcagaaggccgacttctgaagaaagcgggcggatttgatcgacaccgcggccgtcaggacggactttttcttctgtgatcaaacggcgcacttcgtttttcacaagtttagacagtgtctgtttcacttttttgatcgtatcttcatcgtgctcttcttcttcaaatttcgcgacgactgcatctttcactttattgatcgcatcttcacgcgcatgcttttcgtgaacctgaatggcgctgagaagatccggctccgcaagactttttactttttcgctgagctctgcatcaatttcatacagttcaatttcggttttttctttgccgactgccgccacaatttcttcttggaatgcgatcaggcgcttaatttcttcgtggccgaacattatcgcctcaagcatgatttcctcaggaacttcatccgctcccgcttccaccatgttgatggcgtcttttgtgcctgcaacgatgaggttgatatcacttttttcaagctggtcaaccgtcggattgatgatgaactgtccgtcaatgcggcctaccgtcacacccgcaatcggaccttcaaacggaatatcggaaacgcaaagagcaagtgatgaaccgaacattgcagccatttcagatgagcagttctgatcaacactcatgacaatactgataacctgtacttcgttacggaatccgtcggcgaaaagcggacggatcggacggtcgatcagacggctggctaatacggccttttcactcggacggccttctcttttaataaagccgccgggaattttacctactgcatataatctttcttcgtaattaacggtaagcgggaaaaaatctagcggtttcggttcttttgatgcggttgctgtgctgagcactgcggtatcgccgtagcggaccataacagcgccgtttgcctgtttggcaagctggccggtttctactgtaagctgtctgccggcccaatctatggtaaagacatgtttctcttgtcccattcgattacgagctcctctcttaatgtgtgaaataatcaattactcctattatgaacgaaatgaattgaacatatcaatgtcaaagtagtatgtaaaaggatttcattgttttttatcattattttttcgctttaatacgataaaaaagcgggaatcctcccgctttttacgattatcgacgtaagcctagtttgttaattaactcacggtaacgagttacgtctttattacgcagatacgtaagaagattacgacgtttacctaccattttaagaagaccgcgacgtgagtggtgatctttcttgtgagtacgcaaatgctcgttcaagttgttaattgagtctgttaggatagcgatctgaacttctggagatccagtatcagattcgtgtgttttgaactcgctgatgagttggtttttacgctcttgagtaattgccatcctgtttcacctccatatcataattagccccagttacctagcaaccgtcggtgacttcggattgccaagcaatggttttaagactacgaaacatatgatactaaaaatcgcgcccatatgcaaatcttttagaataaaatttgtgtacttttgatgatttttccgttatttgctgaaaaaacggatcgcttcttgtttgtctttctcgatctgggccgtcagttcatcgatgccgttaaacttccgttcgctgcggatgcgtttgtaccactcgattttaacgtcttccccgtatacatcctgttgaaaatcaaataaatgaacttcaattgacggctgatcgggacgcttttcataaaaggtaggtttatagccgatattgcagacgccttcatacttctcgccttttatttcggctttcacggcataaacgcctgtcggcggcacgatataactgttgttgaggccgatattggccgtcggaaagccgatggtgcggcctcttttgtctccgtgaatcacagtgccccggataaaatacggctggccgaggagagtgtgtgccagctcaacgtcgccatcctgcagcgctgacctgatgtaagtggaactgatctttctgtcctgctcggtctgtttttcgacagtcgtgcattcagccttgccgtttaaatcgtccggcagtgtggccatcgtgccttttccgtattttccgtacgtaaaatcaaagcctcccacagcatgctgagcgtttaatcctaaaatataatcctcggcaaactgttttggagacaaagccgcaaacgcttcatcaaactttacgatatacagcacatcggcgcctaaacgtccgatctggctgattttatcttcaagcggcgtaatcagatcctttggctctttgtccctgcccaaaacatgggaagggtggggatgaaacgtcatgacggccagcgacaggcctttttcttcggcaatttgtctggctgttccgattactttccggtgccctaaatgaacgccgtcaaagtagccgagcgccatgacagacgccggctgctcttctttttgtaaatgatgcggatgagaaatatgtatcgtcttcacagaacggtcaccttttttcttattgttcgcttttttgcatcagcactttagccggtttcagcagtcctttttttgaagggtgcggcatataaatggccacacattctccggcttcggtacagaccgctatacgggcgtcagctgtcattgcagaaaattcagccgggatgtcaaacactgacccgttttcagctttcttagctaatgtatcacttatgacccatttcggcaaatgattgagcgctctttcaatcggcaccgcatgctctgcaaccgtgccgtctgaagcctgctgctcaagctcatcaaacgtgaaacactcatcaaggctgaaatcgccggaagcagtccggataagatgcgacatatgcgcgggatagccgagcttttcaccgattgtcactgccaatgttctgacgtaagtcccttttgagcacgtgactgtgaagcggaatgacgctgtatcatccgtataagtgacaggtgaagtgagggagatatcttcaatcgtgatattccgcttcggccgctccacttcaatacccgctcgggcgtattcatagagctttttcccgttcaccttcaccgcggaatacatcggcggcacttgctcctgcggtccctttagttcgtctaaaacggctttgatgtccgtttcatttatcggctccttgacaggttttacgctgacggtttcccccgtctgatcttcagtcgaggtggagaagccgagagtgatctcagcatcgtacgtttttgacttgtcggtaacgtactcaacgatctttgtggcccgtccgacacagatcggcagtacgcctgacacttccggatcaagtgtgcccgtatgaccgactttctttgtttttaacagttttcttattttcattacacagtcgtgagaagtcatgccgaccggtttatgtaaaaggagaactccgttaaccatctgtctttcgctcctttgttatcatttgtatcccgtaaaacgcagaaaagaggacagacgacaacgcccatcctcttttcccgttattcagacggtttatctgaatgcagttcgtgaatcaatgtttcaatacggttgccgtattcaattgattcatcaaattcaaattcaagctcaggcgttttacggagtctgattcggctgccgatttcggaacggataaatcccttcgctttctcaaggcctttcagcgcctcctctttctttttctctccgccgagaacggagatatacaccttcgctatttgcaaatcacctgaaacacgtacgtctgttacagtcagaaatccgattctcgggtctttcagctttcggctgataatatccccaagctcttttttcatctgttctccgacacggtttgctctcatactcaattcaatcacctctaagttaaaaccactctgttctagtgatcgtccgttctatttcgggaaaggagtcaataaacgcgagtacgcgctgaatctccttttccgcctgaacgtgagaggaggagacgacggcgattccgaagctggtccgctgccaagtgtcctgatagccgatttcagctgccgacacgttgaacttattctgaaccctcgtcataatccgcttcagaacggctcgtttctcctttaatgatcccgcatcgtaaatgatgcattcacattccgcaaatccgatcactttctttcgatttcctgcatgacatacgcttcaaggatgtcaccttcgcggatgtcattgtatttcttaatcgtaataccacattcatacccttgtgaaacttctttcacatcatctttgaagcgtttcagaacatctacttccccttcgaagattaccacgccgtcacggatcaagcgaagtccgctgtcacgtgtaatgtggccgtctgttacatatccgccggcaatcgtgccgattttcgacactttgaatgtttggcgcacttcaacctgaccgatgactttttcttcgtattcaggatcaagcattcctttcatcgccgcttcaatttcttcgatgactttgtaaatgatacggtgaagacggatatctacattttcagcttcagccgtgctcttagcatttccgtctgggcgcacattaaacccgataacgattgcatttgaagcagatgcgagaatgatgtctgattccgtaatcgcaccgacgcctgtgtgaatgattttcacttttacgccttctacttcaattttttgaagagcggccgttaacgcttcggcagaaccttgaacgtccgcttttacgattaagttgatatctttgacatcgccttgtttaatttgctcaaacagatcatcaaggctcagcttcgctttgtcgctgcgctgttcttccaattgcttggaagcacgcgcttcaccgacagaacgggctgttttttcgtctttaaagacgaggaattgatcgccagcttgcggtacgtcatttaagcccgtgatttccacaggtgtggacggtccggctgttttcacgcggcggccgagatcattgaccatggcccgcacgcggccgaatgtatttccgacaacgatcggatctccgacttgcaatgttcccgtttgaacgagaagtgtcgcaacagatcctcttcctttatcgagctcagcttcaataaccgttccttttgcctgacggttcggattggctttcagctcttctacttcactgacaagcagaatcatttcgacaagctcgtcaattcccttacctgtaagagcggacagaggaacgaaaatcgtttctcctccccatgcttccggaacgagtccgtattcagtcagttcctgcataacacggtcagggttcgcgctttctttatccactttattcacggcaacgataatcggaacctcagccgctttcgcatggttgatggcttcgactgtttgcggcataacgccgtcatcagccgctacgactaaaatggtaatatcggttacttccgctccgcgtgcgcgcatcgttgtgaacgctgcgtgtccgggtgtatcaaggaaagtgatttttttgccgttttcttcgatctggtaagccccgatatgctgggtgattccgccggcttctccttcaacaactttagtctttctgatgctgtcaagaagggtcgttttcccgtggtcaacgtggcccatgatcgttacgacaggcggacggatttgaagatcttcttctttgtcagcctcttcatatttttcaagctcagtttcttcaagcacaatcacttcttctgtttctacaccgtattcagatgcgatcagttcgattgtgtctttgtcaagctcctggttaatcgtagccattacgcccagaagcatcagctttttaatgatttcagacggttctttgcccagttcttcggctaaggctccgactgttaaagagccggaaaacgtaattttctcaggaagctcttttttcggcttcagcggtttttgctgatgctgatttttgttgttatgattgcgtttgtttttgtttttgttgttgttgttattcttcttgtttttgttaaattgattattctgcacgtcattcttctttccgtctcgaattttgtttggttgattcccagcaggctgctgattaaccccttgcggctgcttgtttttgttcgtttccgcaggcttttgagatttaacgccggcgccgccttttttaaatttcgcatcaagctgcttaatggtcttttcttcaagcgttgccatatggttatttactactatatccatgtttttcagcgccgtcaaaatttccttacttgaaacattgatggcttttgcatattcgtatactctcattttagccattcgttcacccccaaaaatattaatcgagcaagctgatcagcttattcgcaaaaccttggtcagtgacggcgacaacgacacgtgattccttgccgatagagcggccgagatccgcgcggctttcgacttttttataaggtactttataataattgcatttatcggatactttttttgcagtattcgcagatgcatcttctgtcagcagaacaagttttgcacgcgcatttctaatttcttttataaccaagtcctcgcccgacacgaccttacgagctcgattggccagacccagcaagggaaaccattccattccagacatgttattttttcaccttttccgccagttccagcaattcttcgaaaatctggtcatcgatttgtgattgaaattgattttgcaatgtgtttttctttttcgcagctaagatgcattctttctcaagggtgatataggcaccccgcccgttcttcttgcctgtcggatcgactgaaatctctccttcttttgaacggacaattcggatcagttcctttttaggcttcatttcccccgttaccacacatttgcgcagaggaattttttttcgcttattcacctaaagtcacctcttattcatccgattcggctgtttcaggctccataaagagcggctctaaatcgtcatcttcttcatgctctctcggaaagatgccaatgtctcttgcatccgtttcacttttgatatcaattttccatcctgtcagtttcgcggctaagcgggcgttttgccctctttttccgattgccagagaaagctggtaatcaggaacgatgacagtcgtggctttttcttcttcgttgacgatgacatccagcactttagatgggctgagcgcattggcaacaaattcaaccggatcgtcagaccagttgacaatatcaattttttcgcctttcagttcattgacgatcgcctgtacgcgctggcctttaggaccgacgcatgaaccgacaggatcgacgtcaggatcatcagtgcggacggagattttagagcggtcgcccgcttctctggcaacggatttcagttcgaccgttccgtcataaatttccggcacttcgatttcaaaaagacgcttcaaaagaccgggatgtgttcttgatacatagatttgcggcccttttgtcgttttttcgacttttgtaatgaatactttaatacgatcgtgaggtttatagctctcattcggcatttgttcattaacgggcagcagcgcttcaatcttgccgagagacacgtaaataaatttgctgtctaaacgctgtacaattcccgtcatgatgtcttcttcacgatcgataaattctgaataaatcacgccgcgctcagcttcacggacacgctgcgtcacaacttgttttgctgtctgcgcagcaatgcggccgaagtctttcggcgttacttctatttcaacgacatctccgacaaggtagttcggatggatgtgctgggcgtcgtcaagcgagatttcaagccttgaatcgtatacctcgtctacgacatcttttcttgcgaacacgcggatggtgcccgtctcacggttcagatcgacccgtacgttttgcgcctggttaaaatttcgcttatacgcagaaattaaggcagcttcaattgcttcgatgataatgtctttactgatgcctttttctttttcaagaatcgtgagggcatctaatagttcactgctcatgttagcggtctccccccttaaacactaatacttcattcattaaaaagttacagctaatcttgcgttagctattttttcatacggaatattgacccgtttctttcttgttttaatcgtcatctctattgtagcagtttgtccatcaaattcagccaatttgccttcaaacacttttaaaccgtcaatcggttcgtacgttttcatgtacacatttttgcccagtgatttttcgaagtcggcttttttctttaatggacgctcggctccaggagaagatacttcaagaaagtagttttgagtgatcggatcggcctcatccagcttttcgcttaacgcttcgctgactttggcgcactcctcaatatcaacaccgttatcggaatcaataaacacgcgaaggaaccagttttgaccctctttgacaaattcaatgtctacgagttcaagctgaaggtcatctagtatgggctgagccatttcttgaacggtatcagtcacttttttgctcatgtttttcctccttgtgctgtcgatatcatatcagccgttcctctgcataaaaaccctgcttctaaagagcaggggctttgagaaaacgatggacatgtcgaggcaaaattgcctgttcaatacaaaagagcgggtttccccactctttggcctcggtaatcgttagcatttccaataaaactataccataaccatatatttaatgcaaatcaaactccgcctaaaaggcttgctgccaaagcttaaaacagtgacagctggttttggtccggaagcgactccagacagccgtggcggtctaaatactctaaaatggtttttgacacttttccgcgtttttgaaggtcttcttttgaaaggaactctccttcttcccgcgcttttacaatattgagagcggcgttggttccgagacccggaattgagttgaacggcgggatcagactgttgccgtcaatgataaattccgaagcgcttgaacggtatagatcgaccttctggaaggaatagccgcgttcacacatttcaagcgcaagctctaacacggtaaggaggtttttttccttcggcgaagcatcaagccctttagagctgatatcatccataaccgccctgatggcagtcgagcctttaatcatcgtatcaatgtcaaagtcatcggcacgtacggtaaaatacgcagcatagtataaaagcgcgtgatgcactttaaagtatgcaatccgtaccgccattaacacatatgcggcggcgtgggctttcgggaacatgtatttgatttttttgcatgaatcaatataccagttcggcacattgttctttttcatttcttcttcccattccggcgtcaggcctttgcctttacggacaaattccatgattttaaaggccagtgaaggctcaaggccctgatagatcaaataaaccatgatgtcatcgcggcagccgatcacttcgctcagttcacacgtattgttgtgtatcagttcctgcgcattgccgagccatacgtcagtcccgtgagaaagcccggaaatctgaacaagctcagagaacgtcgtcggcttcgtatcttcgagcatctgccgcacaaatcgcgtcccgaattcaggaatgccgagcgtccccgttttgcagccgatctgctcttcagtgacgccgagtgattctgtcccttggaaaatcttcataacctcaggatcatccgtcggaatcgtcttcggatcaattccgcttaaatcctggagcatcctgatgactgtcggatcatcgtgtcctaatatatcaagcttcagcaggttgtcatgaatggagtggaagtcaaagtgagttgttttccattcagaacccgtcgcatcagccgggaattgaatcggtgaaaaatcgtaaatatccatataatcaggcacaacgataatgccccccgggtgctggccggtcgttctcttaacaccggtgcagccctgtacgaggcggtcgatttcagcgccgcgcatgtgaaggttgtggtcgcccgcatagcctttcacatatccgtaagccgtcttttccgcaacggtgccgatcgttcccgcacggtaaacattatcttcaccgaacagcactttcgtgtagttatgcgcatgcggctgatactcacctgagaagttcaagtcgatatcgggtactttatcgcctttgaagcctaagaacgtttcaaacgggatatcgtgtccgtcctttttcaaaggagtgccgcaagacgggcagcttttatccggaaggtcaaaaccggaaccgacggatccgtcattaaagaattcggaataccggcagctcgggcacacatagtgcggagcgagcgggttcacttcagtgatttccgttaaagtcgccacaagtgatgaaccgacggatccccgggagccgacgagatagccgtcatccagagaccgttttacaagcttatgagaaatgagatatataacggcgaatccatggccgatgatgctttttaattctttctctattctcgcttcaacaatttcaggaagctcttcaccgtaaatgcttctggcgcgctgatagctcatttcacggatttcttcatcggctccgtcaattttcggcgtgtacaggtcgtctttaatcggtttgatctcttcgatcatggaagcgactttttgtgtattctcaaccacgatttctttcgctttttccgcacccagaaaggagaaagcatccagcatttcatctgtcgttctgaaatgcactttaggcagttcatgtctgtttaacgggttggcgccgccttgagaagaaactaagatcttccggtaaattttatcctcatcgtttaaatagtggacatttcctgtcgcaacgaccggcttattcagtttttccccgagcttcgtaatgtttgtgataatttctttcagcgctttttcatcccggacgagctcaagctgcagaaggtgcctgtatacttccggcggctgcacttcaagatagtcatagaaagatgcgatatcttcaacctcttcaggtgatttttgcatcatgccttcaaagacctctcccctgtcacaggcagaaccgattaacaggccttctctgtatttatcaagctgcgaccttggaatgcgcggcactctgtagaaatattgaatatgagaaatggacacgagcttaaacagatttttcaagccggtctcattcacggcaagcaatgtagcgtgataaggccttgatctttggtaagcattggattgtcccatattctcattcagctgatcatgataaaaaatatctttttcagccgcgtctttgagcatttttaacagcagatatcctgttgcttcagcgtcaaagaccgctcggtggtgctgggttaattcgatatcaaacttcttacataacgtatttaagcggtgatttttaaattcaggatacaggaaacgcgcgagttccagcgtatcaatgaccggatttttcgctttttcggttttcaaaaggcgcttatacgctacatttaaaaatcccatatcaaagctggcgttgtgagccactagcacatcatcgccgatccattctttaaaatccctgacaacgtcaacgacatcgggcgcgtcgcggaccatgtcatccgtaattccggtgagctctatcgtcgttgctgacagagggtggtgcggattggcgaacgcttcgaatttatcaatgatttctccgcctcttattttgactgccgcaagctcaatgatggtgtcatacactgctgacagacccgtcgtttcaacgtcaaagacgacatatgtgtcttcttccagaagacggtgagcgggattgtatgcgatcggaacgccgtcatctacgatattggcttccattccgtaaatcattttaataccgtgctttttcgcggcggaatatgcatccgggaaggactgcacgacggcatgatcagttaacgcaatcgcttcgtgtccccattttttcgcctgttcgacaagctttccgatgcccgttacggcgtccatttggctcatcggagaatgcagatgaagctctacccgtttttcgccttcaggagcggtgtcttcccgggttttggcttttatttcattcacgtcatttgcaatcatgacgaggtctctgacgaatgtatcgttttggatgcttccccgcgctttcacccacatgccttttttcagtgttttcatgagggcggcgtcttctttttctcttgcaaacattttcactagaatactgtttgtataatccgtaattttgaaaatacagagcgtccgtccgcttttcagctcgcgtgtttcagcatcaaacacatagccctgcaccgtgattcttctttcttcatccatgatgctgtcaagcgtccggatttcttcgttctctttaatttgatagccgatgacaagcggtccggatggcgtctgatcctcatcgccctctttttccttcttctccatttcgataagcgcctgcatcgcccgctcctgatcttcagcaagcttttgctcgcggaatttctgaacttcttggtcagacacgaaaatttcggtatccagctgcagttcaggaaagccgaattggcgatagctgtgctgaatcagtgcgctgtatttatttttgagcgccgatgcttctgtatccgtctttgttttcacgatcagcttgtttcccttgagcttcggcttctgctgattcaaaagggccaccatcggcggcgaggttccttcaagctcttcgatacagcgcgtccaataatcctgtacaagctcctctgacacgctagggtcaatgacttgaatggatgatgtgacacgggcgatgtgagcaaacgattgtgttaacctcatcatgaatgaatcatatatttgatacggcaaaagagccttgaagcgaaattggaaatgccaggccttttctgctttatggattgtcagtttatcaatctctccatcttcaaagtatgtcatgaaggtatcatctgtcatattaagctgctgcagaagaatctgaaactgtcttctgtttactgataactgttccattcagacagtatccctcccttaaaacatcataagtgaaggtacctccgcaggtgatgaggtaccttcttttttctctattttaacatgattttgtacgattcgttatggcgattacttcgtcttgataaattcagaaagctcatccactgaaacttcggcggattcaccggttttgcggattttcacttctacgatgccttcatcggcacgtttaccgacagtgatgcggatcggaaggccgatcaggtcagaatcagcaaatttcacgcctgcgcgttctgcgcggtcatcgtataacacctcataaccttccgcttggaatttgccgtaaagcttctcagcaagctctttttgcgcttcgtttttcatattcagcgccaaaatatgaagatcatacggagcaacgcttttcggccagatcaggcctttttcgtcgtgatgctgttcagcgattgctgaaagcgttctggacacgccgattccgtaacatcccatcagcatcggctgcgcccgcccgttttcatcaaggtatgtcgcattcatagcttctgagtaacgcgtgccgagcttaaagacttgtccgacttcaattccctcagcgaaacggatcgtgccttttccgtcaggtgacggatcgccttcctgaatgattcgaagatcggcatatgcttttacagacgcatcgcgttcgatgtttacgtttcggtaatggcggtctttttcattcgcgccgcttacggcgtttaccatcactttgacagcctggtcggcataaatctcaatgtcgccggcagcgccgatcggccccgcaaatcccggctccgtgccaagcttctccgctacttcttcatgagacgcaagctcaaccacttccgcgttcagaaggtttttcacttttacgtcattgacctcatgatcgcctcttactaacacgagaacaaatcggtcatccgctttaaacagcattgatttgatgcaggcgctcggctcgatctgcaagaaagaagccagctcttcaatgcttttaacattcggcgtatcaattttttccagcgcctcaggtttttcatctgacggctcggtgttcatgacaacttccgccatttccgtgttagctgcgtaagaggacccatcggaatatgcgatggtatcttcccctatttcggaaagagccataaattcatgcgtgtcttttccgcccattgcgcctgagtcggcaataacgggacggacatttaattcgcagcgtgcgaaaatgctgctgtatgcgccgtacatgttttggtacgtttcttccagactttcttcagaggcatggaaagagtacgcatctttcatgatgaattcgcgtccccgcaataacccgaaacgcgggcgtttttcatctctgaatttagactggatctggtaaagagtgagcggcagacgcttataagatttcacctcatcgcgcacgagagaagtaatgacttcttcatgtgtcgcgcctaaagcaaattcgcggccgtgacggtctttcagacgcatcaattcaggcccgtacgtataccatctgcctgattcctgccaagtttcagcctgctgaagggccggcatcagcatttccaccgcgttgattttttccatttcttcacgcacgatcttctgaatgttttgaatgaccctgtaagccaggggcatgtagctgtaaaccccgctcgtattttgtctgataaatcccgctctcagcagaagcttatggctttttgcttcagcatcagccggcacttctctcagggtcggaataagcgtcaaactttgtctcatgtcttcgcacctctgatttttttactagtcaattataagaataaacgctggatatcgttccatgtgacaaccagcataagaagcattaagaaagcgacgccgataaatacgacaaatgcttccttgtcacggttaatcggcttgccgcggattgcttcaataaataaaaacagcagtcttccgccgtcaagcgccgggatcggcagcaggttgacgattccaaggttgatgcttaaaaacgccgcaaactggaataggttgataataccggtttttgcaacctgatccgtcatatcataaattccgacagggcctgaaagcatatcaagcttaaactggcctgtcacgattttgctcagattggtcaagatcgcctttgtgacatcaaccgtagatgtcgcgccgtaagcgatcgcaacaaacgcgcctttttcagtcggcgcataagagccgaagcggccgattgtttttttgttttcatcttttacggcttcaggggtaaccgagatatgaaacgatttgccgtcacgtttcacggcgacatcgatttttttcccgggattgtcttttaccgctgtcacgatgtcagtccatgaccgcatcttttcaccgttaatgctctggatatagtcgccttcttttaaaccggcagccgctgcgcgtccattgtctgtcagttttccgagctcaggctgattcgaaggcacgccttgaatgaatccaagcatgacgagaatgacatatgctaagatgaagttcataatcggaccggcagcaatcgccttaatccgctgccatacaggttttgacccgaattggcggttgtaaggcgcaatctgcacttcttctccgtctacgatgaaaaaagaggtctgactgacagtaaagcccgacagttcatcttctttcccctgctcataccctgtaatcttcatttcgtgctcaagatcagccgtctccacctcgacaattaaagcgtcggggtatttttccttttgattaatgatgactttttccacttcgtcgtctttattaaaaagaagcccgacggtataaccgggtttgacttcaatcatctccgggtcttcaccggccatgcggacgaacccgccgaccggaaggagcctgattgtatacacggtttcattctttttaaatgaaaagattttgggcccgaagccgatcgcaaattcacggcaaaggattcccgctctttgggcgagcagtaaatgccccagctcatggaaaaaaacgagcgttccgaaaataataataaacgcgataactgtattcacgaacataccaccttatgtgagtattgaattaacgtatccccgggtgtctttgtccacttcttggatatccgcaagactcggatcctgaattacgctgtggcggttcaatgctttttcaatcagatcctcaatcgataagaacgaaatccgtccggcaagaaaagcggcgacggcttcttcattggctgcatttaaaaccgtcggcatcgttccccctattttacctgattcaaaggcaaattgtaagcagcggaacctttcaaagtcagctttcgcaaaatgaaggcttccgatctcccataattcaagcctttttgtttcaggcagaggcagccggtccgggtatgtcagcgcgtattgaatcggcaccctcatgtccggatttccgagctgggcaatgacgcttctgtcgtgaaattcaaccatcgaatgaatgatgctctccttatgtaaaacaacgtcaatctgttcatacggaatgtcaaacagccagtgcgcttcaatgacttcaagccctttattcatcattgtagccgaatcaatcgtaatctttgcacccatcgaccagttcgggtggttaagggcgtcggcaatcgttacagactgaagctcctgccgtgttttatccctgaaactgccgcctgatgccgtaatgatcagacgctcgatatttttgctctgttctccttgcagcgcctgaaaaatagcggaatgttcgctgtcgaccggaagaaggggcacgccgtattgttttgcgtgtcctttcactatatgcccggcagtgacaagagtttccttatttgcaagcgcaattgtttttttctgttcaatcgctttcaaagtcgggattaaaccgacgcttccgagcagcgcgttgaccacgatatccacttcatccatgaccgccgcttcgatcaggccttcttctccgatgccgatttgacactcatgagaaaaagacgcttctttcacttttcgatatgtatccatgtcgccgactgctacatatttcggctgaaacgttctgatcaacgggattgctttttcggcgtttttaccgaaagtcatcgagacgagacggaattggtcttcatgcatgcgcaatacatccaatgtctgctcccctattgatcccgttgctcctaaaagacaaatattcttcaaaatgccactcccattctatgcgtccagatcggtcttattttcatattagcctttctcatgaaaaaagcgcaagcagaaagtacaagaacggcatgacaaacaaaaagctgtcaaatcgatctaaaatgccgccatgccccggaaggattttccccgaatccttcacatcatagtgccgtttcagcgctgattccaccaaatccccgatctgtccgaaaacagacagaacaagtgtgatgaccaaaagaaccgggtatgaaatcggaagaccggcaaacagctgaaaaacagccgtgaaaataagggcgatggcaataccgccgagaaacccttccaccgttttgttaggactgatttcaggccacagcttccgcttcccgagcgactttcctacaaaatatgcgcccgaatccgttgaccatatgacaacgcaggcataaaaaatatacaaaagcccgtttgtttcaatgtttctgatttcaataaaataatgaaaacacagtccgatatataccgtcgccaggacgataaatccgacttcatcaaacgtaaaggtatttttcacaagcaccgtatagctgagcaatatcaaaacggcgaaaatcgttacttccattttcgcgtcaaaaaaatgatatttgtccggcatcatatacagccataataacaggaggctgatcagacccggaaaagaaaaaaacttgagctttttcatccgcaaaagctcaaaaagcgctatactgcccatcacataaacaaatacggtgaacggcaatcctccgaaaataaccaaaaataaaaatagtgccgctgccagaacacccgttaacaatctttgtttcatttccaccatcctctaaattccgccaaacctccggccccgctgctgaaattctcccactgccttcagaaagtgatcttctttaaaatcgggccacaggacatctgtaaaaacaaattcactgtaagccacctgccaaagcataaagttgctcaatctgatttctccgctcgttctgatgagcagctccgggtcctgaattgattctgtcattaaatgcttggaaaagagcgcttcatcaatgtcttcgatattcaacgtaccgcttttcacctgttcggccaatgcttttgccgcattgacgatttccgtgcgtccgccgtagttcaaagcgaaattgagaatcagcccgtcattttgttctgtatcttttacggccttctcaatcgccttatacgtatgagaagggagcgcggactcatctccgattattttcacacgtacattctcctcaattaattcaggaagatacgtattcaggaactcttccggaagcttcatcaaaaagtcgacttccatcttcgggcgcttccagttctccgtggaaaacgcgtaaagagtcagaactttgacgccgagctgatttgcgagctttgtcactctttttaccactttcattccttcatgatgtccggcaatccgcggaagtgagcgcttcttcgcccagcgtccgttaccgtccataataatggcgatgtgtgcgggaatttcacccttcagtatgtcttcttttgtataccgttctaagttggaagccgcattctgctgattcttccaatttttgagtatgttgagcatgagattcctccgtcacccaaaaaggttgcgttgctgatgatcaatgtaatcaacagtattaacaaaaaaaccccctgtaaacatgagagggtcttttcacattatctattgtacatagtttttcattaaacttccatgatttctttttctttgtcctttgtaacactgtcaatttttgacacaaattcatctgtcagcttttgaacgtcttcactggaagcacgaagctcgtcttctgtaatgtctccgtttttctcaagctttttgagttcatcgttgctgtcacggcggacattacggactgctactttcgcttcttccgcgtattttttcacgactttgacaagttctttacgtctttcttccgtcagagcagggatcgcgatgcggataattgtgccgtcacttgtcggagttacgccaagatcagctttcaggatcgctttttcaatatcgccgattgctgttttgtcatacggtgtgacaacaagcatacgcgcttcaggcacattgatagaagacagctggttcaaaggtgtttgggcaccgtagtattctactgtcactttatccaatagagacgggttggcacgtcccgcgcggactgacgccaattcgcgtgaataagcggcaaccgctttttccatgcgttcttttgtttgagttaatacttcgtttgacaacgttatttcccccttacgatcgttccgattgattcgccgattacggcacgcttaatatttccttcttccataatagaaaagacgatcagcggaatatcattatccatacatagtgaagaagccgtagaatccatgacttccagcccgtcttttaacacatcgagataagataatttttcgtatttaacggctgactcatcttttctcggatcagcattatacacaccgtcgacattatttttcgccattaagatcacatccgcttcgatttcagcggcacgcagcgctgcggttgtgtccgtagagaaataagggtttcctgttcccgcggcaaaaatcacaacgcgttttttctccaagtggcggatggcttttcttctgatgtaaggctcagcgacctgacgcatttcaattgatgtctgcactctggactgaattccgagagtttcaaggctgtcctgcagggcaagtgagttcatgacagtagcaagcatgcccatataatcggccgtcgcacggtccattcctaagtcactgcctgtttttccgcgccataagttgccgccgcctacgactacggccacttcgacgtcaagctcagcgatttcttttacctgtttagcgatggattggatgacagtcggattaatgccgtttccctgctctcctgccagtgcttctccgctaagctttaaaacgatacgattgtattttggtttttccataataacctccaagtgtaaacattgccgtttcctattatgcaagagaaaaaaaggtttgtaaatatagttttaaaaatagggaacacaagtagtgtcccctatactgcctgaaaagccgcgaaagattcgccaaggctttccgccattattttttcacttggttcataacttcttcagcaaagttttcttggcgtttttcaataccttctccaacttcgtagcggacgtaagttttaacagatgcgtttttcgcagccacaacttgtttcactttttcgtctgggtttttaacgaaagcttggtctaataagcaaatttcttcgaagaatttgttcagacggccttcaaccattttcgctacgatgttttccggtttgccttcttgaagagcttgctgagtcaggatctgacgctcatggtttgcttcttcttcagacacttggtcacgtgaaatgtaacgaggatttaccgctgcaacatgcatcgcgatgtcttttgcaagatcttcgtcagttgttccgctaagaacagataatacgccgatacggcctcccatgtgaaggtaagcaccgaacgcttcgctgtcttcttttgtaataacagcaaaacggcgaagagtgattttctctccgattttagcaacattgcttgtgatgtattcttcaacagtagaaccgttttccatcttttgacccattgcttcttcaagatcagcaggagcgtttgcaagaaggtggtcagcaagtgtgttcagaagctctttgaagccttcgtttttcgcaacgaaatcagtttcagagtttacttctaggataacgcctttgttgccgtcagttttaataagagtagaaccttcagcagcgatacggtcagcttttttagccgctttcgcaatccctttttctctgagaaggtcgattgctttgtccatatctccgtcagtttcagtcaacgcttttttacagtccatcataccagcgcctgttttttgacgcagttcttttacctgctgtgcagtaatagccatttgaattcctccttatatgtgtaaacaagatatgtatagatacatttttcttgaaaaaaggtgataaaaggcagtccctcttatcaccttttgattaggttacgcagttgtcgtttctgtttcaggtgcagtctcttcagcagcttccgcttcttcttcgccttgcttcgcttcaagaatagcatctgccattttagaagtaagaagtttgacagcgcggattgcgtcatcgtttgcagggattacgacatcaatttcatcaggatcacagtttgtatctacaattccgatgataggaatgttcaatttgcgagcttccgcaacagcgatgcgctctttgcgaggatcgatgatgaataatgcatcaggaagatccttcatgtctttaattccgccgaggaatttttcaagacgctctaattcttttttcaattgaacaacttcttttttcggaagtacttcaaacgtaccgttttcttgcattttttcgatgtctttcagacgcttaatgcgtttttggattgtttcgaagtttgtcagtgtaccgcccaaccagcgttggttgacatagtacatgccagatcgtacagcttcttctttaacagaatcctgagcttgtttttttgtgccgacgaaaaggatttttccgccttcagcagcaaggtttttcgtgaagttgtaagcttcctctacttttttcactgttttttgaaggtcaatgatgtagattccgttacgctccgtgaaaatgtaacgcttcatttttgggttccagcggcgtgtttggtggccgaagtgaacaccagcttcaagcaattgtttcatagaaataactgacatgtgatttcctcctaataaaatggtttttttcctccgcttaggtcatttttgtgcagaactgccgcctgcagcaccctctgcataaatcgttaagcgtgtgtatttaacaccaagacataatataacacagctttatgcgacaatcaagaatcctttacagctttgccgcgaaattttaaaaacagctcgatttcggtctttccgctcttcatccgtctggcgatttccgcgggggtgagcccctgttcatataattccgaaacacgttcttcaaacgaaggcgcgccgctgttttcctcgctttcagcccgttccgttgcactgatgagcttttccatgtggtccggaatatcaggctctttttgcggttctggcccaggccgctcgtcttctgcacccgggtcttgatcagcccggctttttgtatcttcaagtctttcattttcttcttttaattcaagcagaaacgcagcaagggtgttttccgtctcttcaagaatcttcttctgctgacgctccgtctccttgagggctgaaaacctcgtgtacagaataatgacggcataaagcagtacgccgtgaagcacaaagcttaaaagccataatagtgttgacatgtttttcactcgctaaccatgagttcattattgaattactttttcaagcagatgctttaatttaaacagcgcctttgaatgaatctgcgaaatccgcgaggtcgaaaggttcaggacttgtccgatttcggtcagagtcagttcttctttataaaataaactgacgacaagctgttctttttcagaaagctcgtggattttgcctgcaagctgagcgatcagctcgtccttcataattttttcttccggcggcacatttttgtcatctctgatcatcacttgaatattctcaccatcatcctgatcgtgaagcttttcatcaattgataagagattggcaaaaaaaccttcattcatcgttgatactacgtcctgctccgtcatccccagctcttcggcgatctctgaaggcgtcacattccgaaggtagcgctgttcaagtttttcgatcgccgcttcgactttttttgtcttctcccgtgaagttctgggcagccaatcttctttacgcagcccgtcgatgattgcaccgcgaattctaaacgaggcataggtatcaaactttaaatcccggccggggtcgaatttttctagggcatcgtataaaccgagcataccaaggctcattagatcgtctttatgcaccgatttcggcagtccgacggaaattctgccgacatgatatgtgaccagcggcatgtaacggcgcattaaatcatcaccggctttaggatctttccactctttccagcgcgaccacagcacctgatcttcataattcaaggattgcatcgttatccccctacctcatacctttattaaatcgttgtttcaccttgtttaacagttcggatgtgcagcatgcaggactttggctcaaattcaatcgtccggccgcttgagccgccggtatcttcactgatgaccgggatgttatacattgaaagctgctctttgatggccgctacgttccttgggccgattttcatcagatcgtttgtcattttgaacttaaacatctccgctcccccggcgagttttgctttcagggcaaacttgcggcatccggctttcaaaagcatgtcaatcgtcgtcttaacggccgtgtctgcgtattttgcacggttaagctccgccgttttcgataaaccggagtccggcagcatgacgtgaacaagtcctgccgtttgtttgtctttatcgtataaaaccagccccacacatgaaccgagtcccgaagtccggattttatccgggtaacgcgcgacttgaacatccgcaatccccactttaacgactgcggcttccgcacggctcataaagccgcacccaatgagacgaagagcttttcaaaagaatcatagtccgggagcataaacatatgggctttgagctcctgccggctgccctggtcaaaaatagaagtatccacgacaatggcatgttctccgacttggctgagctccatcagtccttcgctgataaccgcgccgaacatatcaagcgagatttccggcacgctcgggtaaatctcaagcttcgtcaaatcagccaatgccgttaaataggaacctgctaaaatattgccgaactcatgtaaagcagaagaactcaaatgatcttcgcccaactggtcaatatcaaaattcggatttccgatcagctctctgataaactgttccgcttgatgaaaaggcatgatgagaaagatagaaccggtcatgtcgccttccattcttaaaaagatactggcgaccggcgtttcggcaccgccgaaaaaatcagcaagctcatcaaatgtcaataaagtcgcaaacggcacttccatatcaatctttctgttcagcagctgagccatggcagaagctgaatgaccagccccgatatttccgacttcccgcaaaatatccatctgctcttctttgatcgcttcaaacttactcatgttgtcttatcccctttaagcattcggttctccggacgcagatgccgaagcacctttatccagcaccgcatgcgcatcgataatattgaggagcctgttatcttgctttacgatctgtttaatccacacatccgcttcctttgtctggctttctggcgcggattcaatttcattttcatgcacggtgatgacgtcattggcctcatccacgacccagccgacatcggcgtcacggtaagaaatgattattatccgtgtctcttctgtaatgtcctgttcaggctgattcagacgttttcttaaatcaagaaccggcgtaatcaccccgcgcaggttgataacaccgcggatataagattccactccagggactctcgtcggtttttgccacttttcaattgattttacctgggaaactgaaatagcgtattcttttccgtttatcataaacacaatcattttttcacctgttttgatttcagcagtcatgcgggcacctcctcatgtcgttttagtagatcagcgcattgcaatcaataatcagcgccacttctccgtttccaagaatcgtagcgccggaaatcgcaaagacgttcgttaaatagtcaccgagtgatttcagtacgacttcctgctggccgataaaagagtccacgacaaaagcagtagatttatcgccctttttcacgacgatcacatggaactgatccgcatcctgttttgaatccgtaatgccgaattcttttttcagatagacgatcgggacgatctgccctctgaaatcaatcacttctctgtcatgcgtctgcaggatatctttcttatcaatcacagcagtctctataatagaagaaatcggaatcgcaaaagtctcttcttcaagtttaatgagaaggacggatataattgaaagtgtcagcggaagctgaatactgaaaagagaaccttggccttccgcggatttgacactgacagagccgccgagggactcgagtttatttttcacaacatccaggccgacaccccgccctgaaatgtcagaaatttgatcggcagtcgaaaagcccggtgcaaaaataagctcgtaaatctcattatcttcaagcgtttcagcatcacgttcagtgattacgttccgttcaagcgctttttcaagaattttctttctgttcaggcctgccccgtcatcttcaacctcaataaagacatggttcccgctgtgatacgctttaagcacgacatgacctgattccggttttcctttattcacccgcacttcaggtgattcaatgccgtgatcgatgctgtttctgattaaatggacaagcggatcgccgatttcatcaatcaccgtgcggtccagctccgtttcagcaccgatgatggacaattcaattttcttgtttaattccttttgaagctggcggatcattctcgggaaacggttaaagacggtttctaccggcaccatccgcatattaagaataatagactgaaggtccccggagattcttgtcaggcgttcaacggtttcagtcagttcattgtgatcaagctctttggcgatctgctcaaggcgtccgcggtcaatgacaagttcttcaaaaaggttcatcgaagaatccagtctctcaatgttgacacgaatcgttttcgatccgctgtggtgcttcggctgttcttccgctttcgcttgcggctttggctgtttctcggctgttttagccggaacttctttcaccggttcaggcgcttgcggtttttcagccgtttttaacggcgcgccgacagaaagctcgaccttctccacttctgaaatgccgctgataagctctttaatttcttcagcaggctgcttcgtcaggaaacacacctgaaaatccgttccgaaatcttccgtctcaagcacttccgcggcaggtatcgtttttgcgacttcaccggcttcattcagcttttcaaagatcatatacacgcggacggctttgagcatgcagttttcattcagggaaaccgttatttcatagcggctgaacccctgctcttctgcctcttcaatgacagtccgttcgaactcatcataattccattcagctgaagcctgttgcgttgagcccggcggctctgccgtttcagctgaagcggcagtctcatgcaccgcgtttacgtcgagcttcgcgctcacttcagaaatgtcgcgcttgccgtctcctccgtcaataatggactgcaccatctcttcaagatgatcaagcgcttcaaacagcacatccagccagtctgatgtaaccggcatttctccgttgcggattgcgtccagcacattttccatcaggtgggttaaatgcgccagatctgtatatcccatcgttgcgctcatgcctttcagcgtatgggcggctctgaagatgtcatgcacaatctgaaggtctgacggatctttttccaacagcagcagcttttcgttacatgtctgtaagtgctctttactttcatcaataaagacatctaaatattgattcatatccaattgattcacaccctctcttttttcacacatccggtgatggatgccgcgatttcttccacatgtttaatctcatgaatgaggcccgctttgatcgctgacttcggcattccgaacacaacacaggattcgtcggattccgcaatcgttttaacgccgcctgttctgagcatttctttgacgccttcggttccgtcactgcccatgccggtcataatgacggctaccttttcataatcggacaatcggcttgccgaacgaaacaaataatcggctgacggtttatgccggctttccgtatcatgaacgtctagaatgatgcggagtcttccgccgtcctctgcaaccgtcatattctttccgccgggcgcgatgtacacccatccgtctttagcctcttcaccgttttccgcttccttcacctgaatgtccgacaaatggttcagcctgtctgcaagtgaagcggtaaagccttcaggcatgtgctgcacgacaaatacaggcgcttttaaatccttcggcagcttcggaatcaccttttgcagagcccgcggtccgcctgtagaagtcgcaatgaatacggcctgcttagcggattttgctttcggcctttcaaatcccgccgcagccggacgttccggggtgagaggctcttttactgccgcctcagttttttttgcgcgggacagtccggcggcaatcaccctttcaatcagctgttctttaattttataaagatcaagtgaaatcgctccggaaggcttggtgataaaatcaaaagcgcccatttccaaacagttgatcgtccggtcttttccttgctgcgtctggctcgataccatgattacgggaagtttatatatgctgatgattttccgcaatgtatccgttccgttcatgaccggcatttcaatatcaagcgtgacaacatccggcttaagaagctctatttttttcagcgcctcttctccgtttctggctgtcccgatgacttctatctgcccttccgcagccagaaaatcggtaatcatctttctcataaaagctgagtcatcaacgacaagcacacgaatcactgtaaagtcctcctcattaaaaaagaagataatctctcaataaatgccggtttctcttctcttggtttgttttcttccgtttgaaacaagacatccgtcaaaagacggacggacctgctggcttttgcttgaggactttttattaaaaaaggcacctggtcaatgacagcttgacttactagcggatcatcgggtatggagccggcgaaacgcacctccgcgcctaaaaacgtatgaatcgcgtgagaaaggcgggtgtacgtgtccagcgcatgtttttgggcgcgggcgcgattgacggcaatatttacggtcagccgctcatccgcgagaaagagatgtttgatcgcgctgtaggcatccataattgccgtcggctcaggcgttgtcacggcgagaatatcttccgccgataaaataaacggcagctgttcttttgaaagtcccgctcccatatcaaacaggacgtaatcaaaatcgcttaatacagcggaaagaccgttcataaaagccgaccacttctctctgtcagcttgataaatcgcctcaagccctgttcctccggatatgtagcgaaggcctttcggaccggaggacagtgaatgagcgagcgcataccgattctccatcacatcaataatggtgcgggaagaagcagcgccgatcagcacatcaatgttgcccattccgatgtcaagatcaatgatgagtgcttttttccctttttcctgcagggcaactgccatgtttaatgttaaattagattttccgacgccgcctttaccgctgatgacggccaatgtcttcgcttttttttcataaagctccggcttgatcaattgccgctgcctcattttccttcttaatgactctgcctgatcgggtttcatgtcaaaagcatccttacaaactcttttggtgaaaccgaaaggatgtcttcaggcacatcctgtccatttgtcagataggccgcgccgattcttgattccgacagcagttgaaacacggaaccgagcgaggcggtttcatccgctttcgtaaaaatgaattgattgaccggcacaccggaaaactgtttcagcacctgtttcatatcttcatattttgcagatgccgataatacgagaaaggattgtaaacctgagtcaaacggaatcatctcttgtaattccgtaatatactgctcttctttgaaatttcttccggctgtatcaatgaaaacatggtcatattcagcgaatttttcctgcgccttcagacattcttcttttgaataacatacttcaagaggagcctgaagcagctcagcatacgtcttcagctgttcaaccgcggcaatacggtacgtatccgtcgtcataaatgcaatttttttatgctctgtcagcattgatgaggctgcgagttttgcaagtgtagtcgttttgccggctccggttgaaccgaaaagcacgacatattttgattgaattccttcctgccacctgtctgctgaagggagttttttcactaacaaatcctgcagtttcgagttgacattttcatcagttaaatcgccggaagcaattgaagaacggagcaattcactcagcacggcgttttgcgtatgatcaggaagcccggcttgcttcaatagtctctcggctttttttaatggttcagggagcacctctttgtaatgtgccagatcgtctgaagtactgtgatcagaaagacgcggcggctgaacgggctcagctttctccgccttttccgtctttttcatttcttcaccggcagcaggcggagtttttctcgcttccctgacgtcacgatctaaaacggctatcacttcaacggcttgctgtgaccgcagccccagccattttcgtttctttacttgttttgaatgtaaaataacggcatcgttaccgagttcctttttgatttgcttcgcggcatcctgcattgaagcggctgtaaatttttttatcttcattaaatatccaccactccaatgctctgtacttcaacgtttgcttccagctcattataagaaagaaccggcagatcagggaaatagcgttctaacagctgttttacatacattctgacagcgggcgagcaaagaagaattgccgtctcctgccggatggaaagctgctcggcctctttagcgacagaacggatgatactgtctgaaacctcgggatcgagcgacaagtaattgccttgttcagtctgctgaaccccgtctgcaattgctttttccacccggcctgagcatgtcatgacttttagcgtttcatgctctctcgcatattgagccgtgatttgtttggcaagcgactgtctcgcgtattctgtcaaaaggtctgaatctgttgttaatcttccgtaatcggcaagtgtttcaaaaatggtcaccaagtttctgattgaaactttttctctcagcaatttggcaagcaccttttgaatatcgccgacagaaagagggtttggcgtgacttcctcaacaagcacaggataattttccttcagatgatcgatcagctgctttgtttcctgtctgccgaccagttcatgggcatgctgcttaatcttttctgtaatatgcgtggatacgacagacgccggatcaacaacggtataccccagcatgtccgcttcatccttcgctgcttcactgatccattttgcgggcagtccgaacgacggctcaatcgtttcaattccttcaatgacatcatcttcaggcgtaggcgacatcgctaagtaatgatcaagcagaagctctcctttagcgacttcgttgcctttaattttcaatctgtattcattcggctgaagcgcgatgttatctctgatgcgcacaaccggaatgacaagccccaattcaagcgcaagctgacgtctgatcatgacgatgcggtcaagaagatcaccgccctgccctgcgtctgcaagcggcacaagcccgtatccgaactcaaattcaatcggatcaatatgtagaagctgtacaacgctttccgggcttttcagttcatccgcctgagcctcttcttcaagaatttcttcctcttcttcgctcggcttatccgttttggacagcgtgtaggcgccgaatgcaagcaggccggcaatcggccccgtcagcagaatgccgatcggtgtaagaagaccaagcaaaagaacagttcccgcggctacatacaagagcttcggataagcgaacagctggcctgtaatatcatgaccgaggtttccttcagatgccgctctcgtcacgacaatccccgtagccgtagaaatgagcaaggccggcatttgagaaacgataccgtcaccgaccgtcagcattgtaaagtgagaagcagcttcttgtatgctcatcccctgctgcagcatgccgattacgatcccgaaaataatattgatcatcacgatgatgatacccgcgatggcatcccctttgacgaatttgctcgcaccgtccatggcaccgtaaaaatccgcttcccgggcgactttttcacgtctgtgctttgcgtcctgctccgtaatcatgccggcgtttaaatccgcgtcaatactcatttgttttccgggcatcgcatcgagcgtaaatctcgccgcgacttccgataccctctcggcgccttttgtaatgacgataaactgaataataatcaagataatgaagacaacaagccctaccagcacatttccgccgacaacgaaattcccgaatgtctcaacaacctttcccccttctccatgagaaagaatcgaacgtgtcgtcgacacattgagcgcaaggcgaaaaagcgtcaataacagcagcaatgacgggaagatcgagaattgcagcggttcttgcatattcattgtggtgagaagcacgatcaacgcaagagagatattaatgatgatcaaaatacttaacaaccatggagggaatggaatcaccagcattgccacaatgaggacaacacttattaaaaccgataaatctcttgttgacatgctgtttttctctccttttgaatctgaaattcactatactttttgtttcgttttatatacataagccaaaatttccgcaatgactttgaaaaactcttccggcacggcctggtcaatgtcaacctgatcatataacgcacgcgcgagcggcctgttttctatcgtcatgacatcgtgctctttggcgatctgcctgatttttaatgcgagatgatcgacccctttagcaacaatgtagggggcgtccattttcttttcatcatattttaaagcaatcgcatagtgggtcgggttggtaatgatgacgtcggctttcggcacttcctgcatcattcgcctcattgccatttcccgctgcttctgcttaattttggacttgataatcggatcaccctccgattttttatattcatcttttatatcctgctttgacattctgatatttttctcatagtcaaaacgctggtataagtaatcaagcccggccagcagcattaaagcccccgagcccgcaagccccatccaaagagtgagtttagaaacgaaagtgagcacttccgcaggcgttaaaagcggaaggcggagaatatcgccataatgcagccagagcaccataaaagcggcaaaaccgaccacggtaatcttcaaaatcgatttgaccagttcaactatcgccctcatgctgtaaatccgcttaaatcctttcaagggactgagcttgttcaggtcaggcttgaggacttccgcggaaaacagaaaaccgacctgcatgtaattggacacgattcctgccaaaagtgcgaccagcataatcggcgcaaggatgaggctgatatctttcactgtatccacgaaaagctcatgcacgttagattcagacaattctaatgctatcgatttcgtataaaacgttttaataaaggacagcagcctgtcccgcatataaggtccgagcgcgatcagcgaaagaaagataatcagtaaagaaacggctgtatttacatccgtacttttcgcgacctgtcctttctttcttgtatccttccgttttttcggggtggctttttccgttttttcaccggcaaagaattgcagattcagtctgagtctcatcatgtcacaccgaccaatgccaatagattccgcattgtttcaacggtaaggctgaagatattgcggacgatgacaaacatcaccgccatacaaacgatcagcataataaagctcacagctattttcaggggaagcccgaccacgaaaacgttcagctgcggcactgttcgcgccacaatgccgagcgccaaatcaactaaaaacagactggccacaaccggcgcagacatttgaaaagcgataatgaacatggcattgaagctttttgcgataaaaagtccaaagcgatcatttccaaacgacggaaatgcctgatcaagcgggatatactgaaagctgtaataaatcccgtccaataaaagataatgggcgtttacactgagcataaataacagcgccagcgtataaacgaattggccgatcagcgggctttgcgtgcctgattgcggatcaattacattggcgatggaaaagcccatttgaaaatcaataaaggaacccgctatctggatcgctgccatcatcatgaaagcaatcagcccaaggctcaagcccacaacggcctcttttatgacaagcagcatatactgttcccctatgtcaattgccggcgcatgtttcagtgtgctgaagcagatcaccgaaagaaaaaaagcaaagccgattcggtgaaccgccggcagattccggtgcccgaacaccggcaccgttacaaaaaaagcagaaattctgataaaaaccaataaaaaagcgggaaataaatcaatgatggaattcatttgattctaccctgcaaatcggttcagatgagagaacagatcagttgtaaacgaaagaatcgtcgacagcatccaaggaccgaaaaagatcagtccgagcatcaccgccacgattttcggaatgaacgcaagcgtctgttcctggatttgagttgtcgcttgaaagatactgacgagcaaaccgacgatcagcgcgatcgcaagtaacggcccgcagatcataagtgttacatatacggctttttccgccatggaaattacaaattctgaactcacaattagcacctaccctaaaagctgtcaagcaaagatttcacgattaaataccatccatcgaccaaaacgaaaagcaatattttaaagggcagagagatcataaccggcggaagcatcatcattcccattgacattaagacgctcgccacgaccatatcgataattaaaaacggaataaaaatcataaagcccatttgaaaagcggttttgagttctgagatcgcataagcgggcaccatcgtcgtcaaaggaatatcctgaatcgattcgggttttttcattttggcatagttcataaacagcgccagatccttctgccttgtatgcttgctcatatactctttaatcggtttctcggcttttgtatatgcttcatcgagactgattttgttgtccatcaacggcgttaaggcatccttattaatctctgaaaaagtcggagccatgataaaaaacgtcaagaacagcgcaagaccgattaaaacctgattcggaggcatgttctgcgtcgccagtgaagttctcacaaaggacaggacgatgacgattctcgtaaagcaggtcatcaaaatcagaatccccggcgccactgaaaagacagtcaaaagcagcagtaatttaacagtggagctgacttcggtcggactgcttgaattaaaaagattaatgaattcattcatgatgatacgggcctttcttctttccttcagaacggctttgtttcagctcgttcagctgttctttcagcgcttttgaaaacgacggaagcatcgtttgcggcttcttttctccatccttacgcggatttacgagtttggtccattccacttttgaggacatcgcctcttcgtattggctcagaatcgcctcgcgctctttttcatcttcaatttcttttaaaagctgtatcgtctcgccgacaccgactacgagaacgctgtttcccactttaatcagctgcacggagcggttttggccgactgacgttccgccgatattttctacgtattgaaacggcttcagaaggcggtttcttttattcatcagtttgacaactccgtagatcagcagaatgacaaataataacgccccaatcatctttacaaaatcaaaagcggagacagaagatgcagaagcatcccctatctcttgatcagccgtttgtttcgatgtatcgctttttttctctgttttgtttgttgattgtttgtcaaaccattcgttgacagtggaattgtcagactccgctgcaaaagcagggaacggatgtacattgagtaaaacgaaacaacaaatcaaagctagtaaaccatgactctttttcaacagtcgtacaccctttagcttaatgttttattaatggcttcaagcacgcggtctgcttggaatggcttcacgataaagtcttttgcgccggcttgaatcgcgtcaataaccattgactgctgccccatagccgaacacatgatgattttcgcctgcggatcgatttgtttaatttcctttaatgcggtaatcccgtccatttcaggcattgtaatatccattgtcacaaggtcgggtgaatgctctttgaatttttcgactgcctgtgctccgtccgaagcttcagctacaacgtcaaaaccgttcttcactaaaatatccttgatcatcattctcataaatgctgcatcgtctacaattaaaattctgtgtgccataatctgtttctctcctctatgttcgcttattttaaattgttaaggcggtctgcctgacttaaaatatcagtgactctcacgccgaagttttcttctatgacaacgacctcgccctttgctacgatccgctgattgaccagaatgtcaacgggttcacccgccagcttatcaagttcaataatgcttcccgcagaaagttccaggatttctttaacgcttctcttcgttctgccgagctcgaccgtaacggaaagcgggatatccatcagcatatcaaggttattccttgaaccgtgcccatccgctgcgttttgatcaaacgcctggaactccaccggagcgacttgaacaggagcggcttttttagcagttccctgtctcttcggaagctcgggttttgcctgcggctcctgctgaatggcaggttccggctgcggcgtttcgtatgtttcccgcggttctgatacggtttcatcggcctcaggctgatctgtatccatcagctctgcgatcagatctttcgcaaatgtgatcggataaagctgcatgatgctcgaatcgatgagttcaccgactttcaaacggaatgaaacttttacaagcaggtcatcctcaggtattctgtctgtccctttttcttccgtcacatccagaagttcaacccttggcggagaaatgtcgatctttttactgaatacggtcgacattgacgtagcagccgagcccatcatttgattcattgcttcctgcacggcgctcaggtggatctcaccgagtgacggatcggcgccttggccgtcccccccgatcatcaaatccgcgatgatagccgcgtcgctttgttctacgacgagcaaattgctgccgtcaaatccttctgtgtagttcacttcaatggcaacatacggatgaggaaattcatcactgattttgctttttgaaatgacggtcacactcggcgtcgtaatgtccactttttgatttaaaagagtggacagcgccgtagccgagctgccgaacgaaatattcccgatttctccgatcgcatcacgctcaagttcagacaagttcgcttcttgaggctgttctgtatcctctgagtgactgcctgtgccattaagaagagcatcgatttcatcttgagataatctattgttcatcttgttcacctcttatgtcgtgatctaaaatttgcactgcctgtcttcgattcacccggccggcctgccctaaaaacttcggtttgtttccgaccaatacagtaagaggatcagtcactgatttgtccagagttatacagtccccgacttccaaacttaaaaattcttctattgtcagttcagaagcgcccaagagagccacaacgggaatttgagccgtcatgatgcgcttttcaagcgacttcgtttcttcgggcttcgcttcattccggtctgattgcatccaatagtgtacggaaagcttagggataatcggctcaagcacgacatggggaatacaaagattaatgacaccgctgatttcaccgatctgcgtattgagagaaatgaccacgactgtttcatttggcgaaaccatctgtacaaactgaggattcacttcgaattcagtcatttcagggtcaatatcagcaatggattgccaagcttctttgtagttgcccagtgcattttcaaataagttagaaataatgtttgtttcaatttccgtaagattgtcagctttgttatgcgtgatgccgatgcctcccatgacgcggtcaagcatggcgtaggcgatggtgggattaacctccatcatgattctgccttccatcggatgaacatcgaataaattcaggatcgtcatgttcggtatggagcggataaattcttcatacggcacctggtcgactgagctgacagatatatgaatatacgttctgagcttggcggaaaaatgtgttgtgagaagcctcgcaaagttatcatgtatccgggttaaacttcgtatctgatctttcgaaaacctgagcgcccgtttaaaatcatatacctttacttttttctctttaacttcctttttcagctcttccgcatccgcctcacccgtcgaaatggcggaaagcagtgcgtctatttcattttgggagagaacttctcctgacatcttcttcacctccgtattctgtcaaatttgtttttattgcagattaaaggaggtaatgtacactttctgaacttttccttcttggagatagctgtttactttttcttttaatgattgtttaaacgcttctcttcctttatctccctcaatctctccggcgcttgtatcggctaaaatggaaataatgttgtctttcacttgaaaatcgcgtttttcaagttcttccttcgctttagccgagtcggtctcaagtttgatgccgatgtggatgatgctgtcagattttagatttgtcgtgatatcgtcgacagacacagtggctgcaacgacttcgtcgattgtcggctttttgtctttatcggaatttccgctgacgacaaaatacgctgccgttccgaggccggcgatgacaattaaaataatcagcataatgatgactaattttttcttcattcttcttcctctattccctgatccagtgaaaatatttgtatgctatggtaaaacgatatgactttttcgagaactgcttcttccggttctttcactacgaactttttgccgtttgacagtgtaatcgtcgtgtcggggaagcactcaatctgttcgataaacagcgcgttcagcgtaaaaggctggccgtttaaacgggtgacttgaatcatgctatccggagaagcggcctagccgcttctcctccctccttaccgtttcagattaaccagctcctgaaggatttcatctgaagtcgtaatgatttttgagtttgattggaaaccgcgctgtgcaacgatcatttcggtgaattcatctgtcagatcaacgtttgacatttcaagatagcccgccaaaagcttacccgtgccattttcgcccggagtggtaacagcgctcgcagctcctgaacttaacgattctctgtaaaggtttcctccgattttttccagaccggagctgttagggaacgtgacaagaccgatttgcccggcattatgaaccgcatcccctgcatcagtgtatgtaacggttccgtccgcaccgatactgtaatctttcgcatcagtcggaatgttgattttgccgccgccgattttttcaagatagtatccgtcagttgtaacaaggttgcctttattgtcttttccgaaattccctgcccgtgtgtaaacgattcccgaacctgtattaatctgaaaatagccgtctccgtcaatggcaaggtcgcttttattctgtgtagcctgcggcgcgccggtagaatgaacgacatcaatggaagaagtcgcggcacccaagccgatttgttttgaattggtcacgtttgaaccgccggcgactgtctggctgatcatatctttaaacgtaacgcggcttttcttaaatcccactgtgttgacattggcgatgttattgccgattacatctagttttgtctgaaagtttttcatgccgctgataccggaatataatgaacgtaacatgttaaattccccctgggtttctttttatttagatgtttcgctgactgccgtgacattccacggactgacctctttgccgttttcaagcacgagcatataattgccgtttgagtgttttactgaattgacggggcttgtctgatccttcccgtcgctgtcgctgaatgtgacacttttgccgatccagttcacatacatcgtaaacggatcttgattttcgacatattttgtcatcgtcgtattcaggttcatcatttgttccaatgaagaaaatgtcgccatctggctgatgaattctttgtcatcaaccggattgagcgggtcctggttctgaacctgcgtcattaagatctttagaaattcgtcttttcctaaattcgtgctgctgttcacggcggcggtgctcttcgtgcttgaagcacccgccgcggcataatccgagtttactgatgtcaactattcttcctccatttcattgagagaaagctcctccagcatatctccgaaatcccctgactgctgctggttcttctgctctctctgtccctgatgctgctgtttattgtggtcggccgtctgcccgtaaaccggctgctgatccccgctttgaagcgggacggtaaaacggtcgatctggaccgacatattcggaagcgactgtttcagctgaggaagatgctgttccagcagctctttcgcagactggcttgatgcgatgattttgctttgaaacatcccgttttcgtttgtcaccttaattgtgacaaatccgaggttctcgggattaagacgaatcgtaaagcttccggttgttttcccgaaaggcgtatatttcatctgtttccagccgctgatgacctgttccgttaacggtttattttctgccggctgctgttcagctcctgcggacgcttgctgaatgccggcaatgcttctcgttcccgaaaacaggatatgcgcagacaatttgctgtcaggcgcctttacgtgagaaactgtgccgccgttttgctgatcggttttcccggctgactcttgggacgattcagatgattgagataacacaaaagctttcagctcagtttcagccatgttccattcctttgtccctttttgagaaaggcccgcaagctgctcagtgacgctttgaaagctcttcagctcagcggccgacatggagtaaagcttagatgcagattcgtttttcggaaacagcgtctgccgcagatcttgaatcacacggtccggtacgccttgttttttcaacgcatctaataaacgggtgccttcctggtaaactgcctttgcctgtgcgctgtccggcagctcctcttgatgcgtgaagagccgggctacagcttcttgaatgaatagaagacccgtctccagcgcatcgcgggcggaattctcatcctttgcggaagaattcggctcatttttttcaggcttcaccccatgccgtttgccggctaacatgtcttgaacagattcagcaagctgtttcaataaaggaagggctgtttcagtcgtttgcttcccttcaagggcttttaccgcctcaagcagctgtttcagctgcagttcttgatcttcggggccggccttcagccaatcaccgattttcgaaagagcttcattcagctttgcatcacttgtttttgcttcatctccgggctgctgttgagaactgatttccgacagaagccagttctgaaataggcctaagctgtttacattcaacttcacattgctgttttgcgcagtctgtgtacgattccccgttatttcaagcagcttcaacttacatcactccttatttccgtcagcggatagtttttctgtatacttagccgcttgttcaggagtcaatttcgtcaagatgtcagcaagctgctttttacttaatccgtttaaaatatcgagggcttctttttctttcagctttacgataatgcttgccgctttaccgctgtccatacttttatagatgttgatcattttatcttttccggctgaatccgaagcggcttttttcgtctcatccgttttctgctgctgttcagcttcctgtttcagtgaacggattttctgattcagattgtcgatttcggatttgcttgtgtccaaatctttattcaaaatgttaatttcacttttttgttcctttatggtcttttcaagagaagccgttctgtcttccttctgcttttccgccgcgcttttcgtttctttcgtttcaggaaccaattcttttaaaacaggcgttttagctgctgtttcctgaatcggtttcatcacatctacgccggcagcccaaaggacgatgcttgcgacgatgatcagaaaaatcagcgggataatgataaaaagcaggattgaaccgaactttccagatcccttttctttatcggccatttcattcgctcctaatgcccctgaatcataaactgcttgattgaaatatcgtccatttctctcatttctgcagctttgtcttcaagtgcgaacatattaaattgtttttcccgcattttttcgaatttctttacttcgatgtttttttcggtgagctgttcctgcttctcattcatttcatttcgtttcatgatgacaagcttttgataatgatagatggtgttctcaagattggaaacgaattgctgataatgtctcatttcctgaacgctcatcccgcatttcagctttgattctttgtctttttcgagcaattcttttttgctcatattttcatatagtttttcagctactgtttcaaattcggaaaccgactgtctgtattcagtcaatgtttggtctttttcattttcttttaattccagcagcttttgaaatctgaattggtacgccacgatgttattcctcttttcctgtcagactcgtcaatgccgcaatactattttccaattgagcgggttcttccgttccttgttttaaaaattgaataagctgcggataaaactgaatcgcttcatcaatttctctcgatgaccctcttttgtaagctccgatattaatgagatcttcagagttttgataagttgacagaagatcgcggaatttgttggccgcctttatatgggctgggtctgaaatattagacatgaccctgctgatgcttttcagaatattcaccgccgggaactgccctttgttggcaagcgcccgatcgagaacgatgtgtccgtctaatattccgcgcaccgtatcggcaatcggttcgttcatatcgtctccgtcaacgagaacggtataaaaagctgttatcgtcccttgttcattcgcacccgttctttctagcaaacggggtaaaatagcgaacacagaaggtgtatatccttttgttgtcggcggttcacccgctgccagccctatttcccgctgggccatcgcgaccctcgtgacggagtccatcatgaacatgacattccggcctttatcacggaaatattccgcaatggcggtggccgtatatgccgctttcaagcgcattaatgcgggctgatcagaggtcgcgactacgacaatcgaacgtttcaggccttcttcacctaaatccttctcgataaattcacgcacctcgcgcccccgttcgccgacgagtgcgataatgtttaaatcggcttcggtctgctttgcgatcatgcccatcaaggtgctttttccgactccgctcccggcaaaaattccgattctctgcccttttcccactgtcagcagactgtcaatcgacctgacaccgacacccatcttttcccgtatcggcggccgtttcatcgggtttggcggcggctgttccgtcgaaacgggagacaaacctttcggaagcgcccggccgtcaagcggttcgccgaacgcgtcgacaacttgtccgattaaacctgcgcctactttgatgcggagcgactcgccagtagcctctactatgctgcccggtgcgatgctggccgcttccagataaggcattaacagaatgttttcatcctggaagcctacaacctcagctttaattgcttttttcgcatggcctttcggataaatgagacaaacatctccgatcgagctttcgggcccttttgattcaatcatcagcccgatgacacgcttaaccttgccatagcgtttgtacggatcggctgtttcaatcgagtctattaaatactgtgtcttcattgctccgctcccgcctcaagcgccgttaaaagcttttgttttaattgcatcagctgggtgtctataccggcatctacccgaccgaacggagtttctatcgagcacgttccccttgcagctttttcatcggcatataagcttaacctgcattctttgtataacagctgctgaatttcgtccatatgctgatgaaccgtttcataatattcaggatctacatagatggagatgtcatcataatctttcacttcggctattacctgtttgaccagcagaaggaaagcttctttatcatcgcttttttgctgccatacttttttggcgagcgcaacggaaagctcaatgatttcttcctcagcgctttccagtttttcctcgactgactgtctcgccatttccgtaaccgcattggcgcggctgatgagatttgcgtattgggtttcagcctcggcttttcccaaagccatgccttcttgataaccttctgcctttgcttcttccatcagtctttgtttttcttccgcccagcggcttttctcttcttcaatctgcagaagagtatactccaattgatttttcgcttcttcagacacccggtcggcttcggccttggcaaaagccatgagagcctcagggttttcggctttctccaggtcaaactggggatgcgtatttctgacttcctgcaaggaaagcttacgacgtttctgttcaggagaaaatgatgattgctgtttaatgacattagacaataatatcgtctcctccgcctcgcgcgattacaatttcaccggcttcttcaagcttgcggatgacgcccacgattcttgattgcgcctcttccacatcacgcaaacgcacaggccccataatttccatttcctctttaaacgtttcaaccatacgctgtgacatattgctgaagacgatctccttgacttcctcgctcgcaaccttcaatgaaagcagaaggtcgtcgttttcaacgtccctgatgacgcgctgaatcgcacggttatcaagggtgacaatatcttcaaagacaaacatccgttttttgatttcatccgccaattcaggatcttgtatttctaatgaatcaaggattgttttctccgttcctctgtctacgccgtttaatacttcaacaacggcttctatgccgccggtctgcgtataatcctgcgtaaaggaggaggacagcttttgttcaaggacccgctccacttcattgatgatttcaggagacgtcctgtccataaccgcaatccttcttgccacctcagcctgaacgtccgggttcagctcagacaaaatttgtccggcctgcaccggatcaaggtaggataaaatcagcgccatcgtttgcggatgttcctgctgaatgaaatttaaaatctgttcgggctccgcttttctcgcaaagtcaaacggctttacctgcaaagaagaggtcagcctgtttaaaatgcttaccgctttgtcttctccgagcgctttttcaagcacttggcgggcgtaatttaaaccgccttgagaaatatagtcctgagcgattgcgatattatgaaattcttcaatgatttcatcttttctctgatgatcgacgcttctgactcccgaaatctcaagtgtcaatctttcaatttcttcttcagacaaatgcttgtaaacagaggctgatacatcaagacctaaggaaatcatgaggatggctgctttttgttttcctgtaagcttgttctgatcacgtttcgccattttccattccccctaatcctcgtccagccagcttcgaagcaattttgcaaagtcttccggtttttctttagccattttttcaagctgttttcgtctgactgtttcttccgtttcattttgctcttcgttaatatcaggcaatcgaaccggctccggcggtgtttcatattcgtattcttcatactcatcttcttgtgagcgtttctttctgatgagaagaataataagcagaataatggccgcaagcagtacgccgcctgtaatgtatacccagatcgggagacctgatgagtttgccgacgcagtattcgtgctgacttttccgtcaaacggctgaaccgatacgacgattttgttgttgatatcattgttcgtcagtttttgattttgcgcctcatttttatcaagagacgttctgacgacggttcctaaaatcttttgaatatcagcctgtctttgagctgttaaagacgcggcatttttcggattcggcggctccaccatgacctgaatgcctaaatcgcgcactttatatgggctttccgcaatttctttatgaatgcggttgacttcatagttgattttattgctgcttttttcgtagtctccgctgtttgaaccgccgttggccgctgcatagtttgcggtgtcattgcttcccgttccggccgtgccgccgttggctgctccgtcgcctttatacgtttccgccactttttcggcgcttatcgctatgccttccatgttatctttatcgacaggctcgacgatgtcttcagtgcgtttttctttcgtaaagtcaatatcagccgtaacggatacaacgactttatcctgccccatcattgtgccgagcagtgactgaacatgtttttgaatgtccttttcgacctgcgacttaataccctgctgagaagcataactgtcagaaacggaccctgcaccgctgtcacttttgtcatagtatgtagagttttggtccattatgacgatattatcttcttttaagttcgggacgcttttagaaacaagatggtacagcccgttgatctggctttgatcaagtgagtagcccggttttatctgcaaaacgatcgatgcggatgcttccggctgatcttcaccgacaaacacggcttctttcggcatattgatcatgactttcgagcttttaataccgtccatttcatttatcaggtttgacaattcagtctgagtcgcatcaacctttaaaacgtcaaactcattatctgtcaggccgaagcctgcattttttccgaaaaacgaataatcaattgatcccgttttcggcaggccttccgcggcaagctggactttaagcgaatccacttggctctcaggaaccataatgaccgtgccgccgtctgcaagttcagaagacacttttttcgtatcgagctcctctttaatctgccccgcttcttccgcggacaaatctttataaagaggcaccatcttttcagacgaagtaaaaataataacgacgatgagtaaaattatgaatgcggccaagccgcttaccatgagtatcttctgtgtttttgatctgttattccaaaacgctgacgttttggttttcatttgcattagagtacgattcatgttaacccccggtcattccagtcattctcttcaatctgaccactacatctgcattctcatgatttcctgataggcttccacggctttattgcggaattcggtagcggccgtcagagaaatatttgctttttgggcagcgatcatgacctcgtcaaggtttacatcctttcctgcagccagttcgttcgttatttggtcagattttacttgtgactcatttaacgaatcaattgagttttttaaaagctccgaaaagcttgtttggtttgaagaatcagttttttgcgtttggtttaattgattcgttacgttttgagtgttttgcgtttgttgaagctgaaaaggagtaatagcgttaaccacttacatcaccttactttccgatttctaaagcctttaaaagcatgcctttggaggcgttcaatgccgtcacgtttgcttcatatgatctcgtgctgctgacaagatccaccatttcctttaatgggtctacatttggtttttgtacatatccgtctttattcgcatccggattttccgggtcgtaaacaagattaaaagcggatgggtcttccgtaaccgcggatacttttacgccatttcccgcgcttccgattccgttcatcttggaatttaaaagggacgaaaatgattcgcctccggattggagagatacgagctttcttctgtaaggcacccactcgccatttacctgcttcgctctcgttgtatccatattggccagattggacgatacgacgtccatccggacacgctgtgcggttaaagcagagccggaaatatttaagctttgaaagccactcattattttcctcctgtcaagacggttttcagggaattgaatttgccgctcattctttcaaccaaagcctgataattaatttggttttcggctaaatctgtcatttctttgtctatatccacattgtttccgttttgctggtacgatgtatcaccgctggacacaatggaataatcggcccccgaatccgtaaagtcaacgtgccgatagtcggtttttacagcctcaagattagatgtttcctgatctaacaaatttcggaaagagactttttttgccttatagttcggtgtatctatattggcgatattgttagttatgactttttgcttaatgtccgctctccccaaggcattctcaagattttgtatagttccagaaaataagtccaaatccacttacctccatttcagatatttttctcctaaaaatccttgtcgagaattgtaaaaccatatgcttattgtaagaaataacaggcttaaagtctatgaagttaggctaaaaaaaagtgctcaattatatctattttgtaagtaggtattaagtcctagagtatttgtactacaagcatttgtttaatataagactgaaaatagctcaatttctgtattttccccttttttcacacagcaagatggattatctcagatcagattccaataatcaactttaaattgcaacttttcacccattgttcataaaaaaagcaggacccccattttcaggggatcctgcttttggtttaatgtgatttaagattttccaattcaataaggaatttgttgttcagaactttaatgtaagttcccttcattcccagtgatctggattcaatgacgccggcgctttccagctttctcagcgcgttaacgattactgaacgcgtaatgcccacacggtccgcaatcttacttgccacaagcaagccttcgtttccgtcaagttcttcaaagatatgctcaatcgcttcaagttcactgtaagacagagaactgatcgccatttgaacgactgctttgcttcgtgcttcttcttcgatttcttccgctttttctcttaaaatctccattcctacaacggttgctccgtattcagcaagaatgagatcatcatcttcaaattgatcctgcagacgggacagaatcaatgtgcccagacgctcgcctccgccgataatcgggacaatcgtcgttaagcctgcctggaacaggtctctgttttcaacaggaaatgccgtgtattcactgttgatatcaaggtttgaagacgtctccggaacgttgaacagatttttcgtgtactcttccgggaactggcggtcttccagcatttttttcatgcggtcattttcgatctgctgattaatagagtagcctaaaagctttcctctgcggctgacgacgaaaatattagaatcaatgacgtcacgaagcgtttcagccatttctttaaagtttacgggtttgcctgccgcagcctgcaacatgctgttaataattcgtgttttttgtagtaaagccatgttaaataatcctcctagaattcctcttattaaattttcacaatataaattgacttagatctttgttgtttgcaatcgttccgagcttttcttcaacgtattgcggcgtgatggcgactttttccatcgtcacgtccggcgcttcaaacgacaggtcttccaacagcctttccaatatcgtgtgaagccttctcgctccgatgttatccgtatcctgattcacatgataagccacttcggcgatcttacgaatagcttcgtcagaaaattcaagagatataccttctgtctgcaataaagcctgatattgttttaacagcgcgttatcgggttccacgagaatcttcacaaaatcatccaccgtcagcttgctcaattctacacgaatcggaaagcggccctgcagctccggaatcagatcggacggtttggccatatggaatgctccggcggctataaacagcacgtgatctgttttgacggagccgtatttcgtgacgacggtagaaccttcgacaatcgggaggatatccctttgcacaccctctctcgatacatcggctgaggaagaagctcctccgtttttagcaatcttatctatttcgtcaataaagatgatgccgccctcttcagctcttaacacagcctcctggctgacttcatccatatcaattaatttgcctgcctcttcattggtcagaaccttcctagcctctctgaccgtcattttacggcgctttttctttttgggcaccagattgctcagcgcatcctgcatattcatgcccatctgctccatacccgagccttgcagcatgtcaaacatcgacggctgctgctcttccacctctacggaaacgtaatggtcttcgagctctcccaatgcgagctgatgcgccatgcgttttcttttttcttcaagactagcttcttcctgctgatcggcttcatcatcgtttgtcggctggcctcccccgaaaagcatttcaaacgggtttttcactcccgcttgttttttctttcccggtacgagaagccgcacaatacgtttgtttgcattttcttcagcctgttcttttacttcgctgattttttcttctttaatgagccgcactgatgtctcaacgaggtctctgaccattgattcgacatctctgcctacatagccgacttctgtaaattttgtcgcttcaatttttataaatggcgcaccggtaagcttggcgatccgtctggcgatctctgttttccccaccccggtcgggcccatcatcagaatgtttttgggaacgatctcatctctcagtttttcatcaagaagacttctgcgatagcggtttcttaatgccacggcgacagcttttttcgcatcctgctgtcctacaatgtattgatccaaccgatctacaatttgtctcggtgttaacggtttgttttccatgcgcctcaagtcctttctattcaagttcttccaaaatgatctgatcgtttgtgtacacacaaatctcgcccgcgattttcaaagcggcatgtgcaatatctttggcggacaggttctctccggcataggttttcagcgctcttcctgctgacagggcgtagtttccgccggagccgatcgccataatgccgtcatccggctcaatcacttcacctgttcccgatacgagaagcaaggtatcctggttcatgacaatcagcatggcttccagcttgcgcagcactttatcgctgcgccattctttcgcaagctcaaccgacgcacgttttaaattgccgttgtattcttcaagcttcgcctcaaacatttcaaaaagtgtgaaagcgtctgcaacagatcctgcaaagccggcaagaacctttccgttaaacagctttctcacttttctggcagtatgcttcatgactacagcctgaccgaatgtgacctggccgtctcctgacatagcgctttttcctttatgctggacggcaaaaatcgttgtcgcatgaaaagatgacatgagaagggcctccttttaattttctttaaaagctctcggatggtgggacatatatgtgtttctcagcatttccttcgatacatgcgtgtatatctgtgtagaagacagattggaatggcccagaagttcctgaacgcttcttaaatcagccccttcattcagcagatgggtcgcaaacgtgtgccgaagcatatgcgggtgtatatgtaaagtgccggatgccttttttacaagcccgcttaaaatataccggattcctctggcggtaagcggaccgcctctttgattgacaaacagcacatcatgaggctcttttgctttttcaagcaggcactgtctgccgctgttgatatacagctccagcgcatcacgggcatatgagccgaacgggatgtagcgctgcttcctgcctttcccgtgaacgagcaccgtatccatgaacaggtcaagatcactgacagtgagcgtacagcactcactgaccctcattccggtcgcataaagaagctcaagcaaggcctgatcgcgcatccctgacggctgacttctgtctgaaacagcgaatagttcctcaagttctttttcataaagaaacttcggaatccgtttctcttgtttcggcagatgaacaagctgaaacggattctcttcaacaagcttttccctcattaaaaatttatagaagcttctcaaagctgaaattttcttgctgattgtttttcttgacaggcctttttcataagcttctgtcaaaaatattctcacatcatgatatgcagcttcattcaatccatttatattttgagcatgcagaaacatcccaaattcttcaatcgaattaacataattcacaatagtatattgtgaataatttttttcaatttgtaaatattcaacgaataactttaaaaaaaagttaacattctcagccattatgaagacctccctctccgaagggcttttaaatggtatcatattatgcattgaagttgcaatgaaaagctatatcgttttcgaaatagtttgaatagtctcaattgcgcgtttagcgtattcttcgtttcgttcttttttgtttttaattttaacaggcaattcttttaataagccgaagtttgcattcatcggctggaagttcttctggtttgtcgtcgtaatgtagtgagccatgcttccgatcgccgtctcctgcgggaatgtcacaaggtcctgaccgagaacaagtttggccgcattgattcccgctacaagacctgacgcagcagattcaacataaccctctacgccggtcatttggcccgcgaaaaacaggtcgttccgctgtttaaattgatatgtcggattcaagaggctcggcgagttgataaatgtgtttctgtgcataacgccgtatctgacgatgtcaacattttcaaggcccgggatcagtttaagcacttctttttgatctccccattttaaatgtgtctgaaaacctacaatattataaagcgttcccgccgcgtcgtcctgtctgagctgaacgactgcataaggccgcttgcctgttttaggatcttccagtccgaccggtttcatcggtccgaacagcatcgttttcttgcctcttttcgccatgacttcaatcggcatgcagccttcaaagaagatttctttctcgaattcttttaacggaaccgtctcagccgtcgtcagcgcttcatggaaacggtcaaactcttcctcagtcatcgggcagtttaagtatgccgcttctcccttgtcataacgggattttaagtacactttatccatatcaaggctgtctttttcaacaatcggcgccgccgcgtcataaaaatacagatattcttctcctgtgagctctttcagctgctgtgaaagcgattctgacgtaagcggaccggtcgcgataactgtcgggccttccggaatctcagttacttcctcgtgaagaaccgttacgttcggatggtttttcacaagatccgtcacgctttgcgcaaattcatggcggtcaacggcaagcgctccccctgccggaaccgagcacttatcagcagattgaatgattgctgagtcaagcgcccgcatttcttcttttaatacgcctaccgcattggcgagcgtatttgaacgcaatgagttgctgcataccagttccgcgaatttgtcagtatgatgggctgccgtctgctttacgggccgcatttcatatagctttacttgaattcctcgttttgcaagctgccatgccgcttcacttccggctaggcccgctccgattacatttactgtttgctggttcatttcttttcatctcctgttgtttgtcccttccacacaaagaaggtgagcaaggctctgctcaccgctacttctgtggttcttccttataatcgcattcgacgcattggacttgtatgccttttttaagctttttctctacgagcatattttcacatttcgggcattttcgttcaatcggtttgtcccaagatacgaagtcgcattctggataacggtcacagccgtaaaaaacgcgtttcttttttgattttcgttcgacaatgtttccttcatggcatttaggacatttaacgccgatttgtttgactatcggcttggtattccggcagtcagggaagttggagcacgccatgaatttcccgtaccggcccattttgtaaaccatccgggagccgcataactcacaatcttcatccgcgtattcaggttcaatttccacttctttcatttcggcttccgcttttttcacgcgcttttcaaagtcggtatagaagctgtcaatgatttgaacccattctgtctcgccgtcttcaacatggtcaagatctctttccatttttgccgtgaattcaacgtttatgatttccgggaaaaactccatgatcagatccagcacgatctgccctagctcagtcggcacaaaccgtttattgtctagtgccacgtaaccgcggcgctggatggtgtcaagagtcggcgcatacgttgaaggacggccgatacccagttcttcaagggttttaaccaagcgcgcctctgtgtaacgcggaggcggctgagtaaagtgctgctcaggctcaatatctttggataaaaccgtgtctccctctttaaggtccggaagcatgcggtctttttcttccagctgatcgtctttaccctctacatagactttcatgaagccggcgaatttgactttactgccgtttgcccggaatgtcaatccgttattgctgagatcaacactcatcgtatccagaacggctggcgccatctgacttgcaacaaagcgctcccaaatcagcttgtataatctgagctggtctcttccaagcaccgcttttaactcggcaggttttctgagtactgaagtcggacggatcgcttcgtgggcatcttgtgcgttttcatttttctttgccgctttccgttttcccgctaagtactcttttccgtatgcctgatcaataaaagctgacgcttcttcaacggctgtgttggaaatccgcgttgagtccgttctcatatacgtgatgagcccgactgttccttctttgccgagatcaattccttcatataactgctgagcgatcatcatcgttttcttcgctctgaaattcagtttccttgcagcctcctgctgcagggtggacgttgtaaacggcagagcgggatttcgtttacgttcttttttcgtaaccttgtctaccgtatacttattgcctttcagctcagcaagaacagctttcacgtcttcttcgctttttaaaggaagctttttgccgttttttccgaaaaagccggcttcaaacgtctcttttccttttaaaaatgagccggtaatcgtccagtactcttcaggtttaaagtcgttgatttccttttcccggtcgatgatcagccggagcgcaacggattgcacacggcccgcactgaggcctttttttacttttttccaaagaatcggactgattttgtatccgacgagtctgtctaatatgcggcgcgcctgctgcgcatcgacaagatccatattgatcatgcgcggatgtttaaatgattctttaatggcgtcttttgttatttcattaaagacgacccggcagtccgagcttagatccagatcaaggctgtgcgcgagatgccatgcaatcgcttccccttctctgtcggggtcggccgcgagatagactttttttgctttcttggccgctgtttttaattcttttaaaacagggcctttcccgcggatcgtaatatatttcggttcaaagttctgttcgatgtcaactcccatttgactttttggaagatcccggacatgtcccattgaagctttgactttatattttttccctaaataacgttcaatcgttttcgcctttgccggcgattccacgatgactagataatcagacattttcatccccctcaagaggtgttctctctcttttcaagtatcaattcattttagagctgcctttttatggctttcaacatttcattctttatgatgaacgtcattttatacatgaaaataatgtgcaactttaaatcctcactattattaaatattacaataccgtttgtcaaacgatatttcaaaagggttccgtatactgaacgcctcgggcggtcagctctccgtcaatatcctctgcgcataataccgctttcgccccttcttgaatgagttttataggtcctccggaatatggattaaaaatggaaccgggaacggcaaatacctctctcccttgatcaagggcttgataagccgtgattaatgaaccgcttttttcttttccctgcacaactacaattccttcacttaatccgctgattatgcggtttctcatcggaaaatgccactttttcggctttgtttcaggaggatgttctgagagtaggagatgatgttcagccatatattctgctaacaggagattttcccggggatagatatgatggaatccgccggctattacgccgatcgtaagcccttttgccctgatgctcgccttatgagacaatccgtctatgccggatgccagcccgcttactatgacccagcctttttttgagagttcagcggtaagatgcccaaccgcttttattccgtcttccgtcggtttccgcgttcctacaatccctatttttctgcctttttcaagaagtgacgtatgcccttttgcaaacaagacagccggcggatcataaattgttttaagccatgaaggatagcggcttgatgaaatcgggatgacagtactgccttctcggcggtaatcggacagaactttatcaagttccggttccttgcgctctatttctcgaaaaattgctttcggagctgttttcccttctgacaaaacagttaatggatgcggatctcgtaaaaaagacagagagtgatcagctttccaccattttaatagaagagacggggaaatgatttgattgatactgcagaccattaaacagcgcgacgcttgatccaaatctggcaacctcctcttttgtacagcaaaaacaggaacagccgttacggctgcccctgctttgatcagtgagttttgcacgtttcaaataagcctttttctttcaacaccttaatcagtgtttcacccattacagaaggggtttccgccacttcaatcccgcaggcgttcatcgttttgactttttcttctgccgtgccttttcctccggagatgatggcgcccgcatggcccatgcgttttccaggaggggcagttttaccgccgataaagccgacaacaggctttgtcatgttcgctttcacccactcagccgcttcctcttcagctgtgccgccgatttctccgatcatgatgacggcgtgtgtttcaggatcttcattgaatgcttttaacacgtcaataaagttcgtgccgttgaccgggtcgccgccgatacctacagcggtagattggcctacgccggcttctgaaagctgatggacagcctcgtatgtcaatgttcctgaacgggatacaacgcctacatgccccttcttatgaatgtatcccggcataatgccgatcttacattcttcaggcgtaataacacccgggcagttcggccctattaatctcgttttcttgccttccataaagcgtttcactttcaccatgtccaaaaccggaatgtgctcagtgatacaaatgacaagatcaatttccgcgtcaaccgcttccataattgcgtctgccgcaaacggagccggcacataaatgactgacgcatcagcgcccgttgtgtgaaccgcttctgcgaccgtattgaataccggcacgccttccgcttcagttccgccttttccaggtgttacaccgccaacgatattcgtgccgtattccagcatctgctttgtatgaaataaagcggtagaacctgtaatcccctgtacaataactcttgtatctttattgataaaaacactcattatctggtcccctgcctttcattctttcctaaactaaggatacgattttctgcgcgccgtctgccattgattccgcagatgtgatatttaagcctgattcattcaggattttctttcctaaatctacgtttgtcccttcaaggcgcacgaccagcggcaatgtcaatccgacttgtctcgtcgcttcaacaacgccttcggcaatgacatcacacttcatgatgccgccgaaaatattaacgaaaattccttttacgttttgatcggaaagaatgattttaaaagcttccgtaactttttcagcggttgcgccgcccccgacatccaggaagtttgcaggttctccgccgtagtgtttaatgatatccattgtagacattgcaagacccgcgccgtttaccatacagccgatatttccatcaagggaaatgtagcttaaatcgtattttgaggcttcgatttctttcggatcttcttcatctaaatctctgtattccataatgtctttttgtctgtataacgcattactgtcgaagttcagcttagcatcaagcgccatgacgtttccgtctcccgtgacgacgagagggttgatctcggcgatggagcagtccttctcaacaaatgctttatatagtccgagcataaatttagcggctttgccgacaagctctttcgggatgttaattgcgaatgcaatctccctcgcttgatagccctgaaggcctacagccggatcaataaccgcttttttaattttttcaggtgttttttccgctacttcttcaatttccgttccgccttcttcagacgccattaaaacgattcttgaagtggcgcggtcaagtacaagcccgacgtagtattcctttttaatatcgcagccttcttcaataagtaagcgttttattacttgtccgtccggacccgtttgatgtgtgacgagcgtcttgcctaacagttcttcggcatactccttcacttcatccgttgtttttgcaatctttaccccaccagctttgccgcggccgccagcatggatttgcgcctttacgacataaaccgagcttgacaggctctctgctttttcaactgcttcctctgctgtaaaagccactttaccttcaggaacagacaccccgtattttctgaggacttcttttccctggtactcatggatattcatttcccatcctcctaacttatgtagcaaaactaaaaatagactgcgctttcattctatataatactggaagaattgtctagggttcaaaacaaaatctttatatccttccaaacattctaacttttattttattgaaaatataaatttaaacggagtctgggaaatgattgatccttatttttcgtttttcaggctttcatccagccggtaaacaaatgaaaaaatttcagcgacggtttcataaagcgcttccggtatctgatcgtcgaccgtcaaatgccgcattaattcgacaagggtcctgtcttcctgaatcgggacccccgccttctcagcttcttttatgatattttccgccacatgccccctgcctgttgcgataaccttcggggcttgatctttctgccggtcgtaatgcagggcgacagctcttcttaaccgagtctgctctttcatactttcacatccacttttcgtccgccgtctttttccataaactcatccacaagagcgctctggtctttcggacgccgtttttttgccgtgatgcctgacaggctgaagcccgtttcttttacggcttctttcaaagccggcacgagagggtcgatggccgcctgaagttcaaaatcggtctcaactgtaatggtcattacattttgctgaatcatacagtccacgacggtttcttgcagcgtttcaagatgcagtaaaaacaggagcctgcaatgtgacggatcgagttttccgtccggcttcttccgtcctttaaaaagaactgtaatatcattctcatatgcggacgctcccaatggaaatgacagcaccatctgcgtaaaagaagggttatgctgctcaataaacagttggccgtttaatttatgaataagcggttctgcctcttgtttaacggcttggggtgcttcttgaagcgtccggacagcctggagggccgttttcagcgcttgtttctccggctgcggagacattcccttttcaagcgctgtaatgaatgataattcatcacgggtgcccagcccttttttgattctctgcaaaaggcttaatacatcatgtttttccgtatatttcagttcggtaagctggacagctttttcgaaaacagccgtctcctgttctgtcagttgtgctttttgaagaacaggtgctgttttggatgttttttcttgcgaaataaaagccttgatgatgtccgccgtttcttttacggggcggttttcattcttttcggctgatgccattaatttttcgataatctgttttgcctctttttcaggcagttccgtatccgtcctggcattcggaagagaaggctggctcggggctgtctttccgttttcacgagtcactcggacaaatggtgattgttttaattctgtcccttctccttcttctgtcagcccggtttctgaaatcggcatgcgcgcggccgaagcaagcttcttcaagagacgttctgcatgaagatctgtttccgcgtctaacacgtcagaaaccgcctctttaagcacagacagctcttttgccgattgcggagcctgattgattgcctgaagcagtcctgatagaaggcggcgggtcggaaacgggtatttgacggcatgaatggctgacaagacttccggatgcgcgggcagttcccgtttaagtgcaaatacaatagtttctgccgcttttttcaattcggctgccgggagcgattcagcccagcggatacaggctttgaggctgttttccgtcatcggcagtttctgatgcataaacgtttcggcaatatgctgagacaccggtcccggtttgacggaaagggcgttcagcagtcttcccgccgcttcttgaacggttttcgggcttccttcgaattggtcaacgacatgaagccgacccgttttttcagccggctgcttttcataagaaaaccagtaatacgcctgcggccggagggcagtttcaagctttccctgcatcgtccggccgccgatttggataagggcgctttgatcatccaacaagcggagaaccttccctaacagcagcctttgggtaccgctgtctttgctgccgtcttgcctttccggagaggtttctgttatcagctgtctgaaagccgcttggatttcgccgcttatgttcatgtcttacgcctcttttctaacaataagattgaacgggagcgaacgtttttcggtgaatatttgtcggtccgtatgcctgaagagcttcaagatgttctttcgttccgtagcctttatttttttcaaagccgtacatgggataggttttggcgtattcagccatgagacgatcccgcgttacttttgctatgcaggctccggcggcaattgatacgcttttggcatccccttttatgacagatgactgcggaatgtcaagcggaagcgtcatggcatctgcaagcagataatctggtgtttccgctaaagcattgaccgcttttaccatcgccagtcttgccgcctcataaatgttgattcggtcaataacatccgcatggacaatgccgactcctatagccgccgcttcttccgtgatccgggtgtaatactcctcgagcttcttttccgataatttcttcgagtccgtgagaccgagaatttcgcactgtgccggcaaaatgacagcgccggcgacaaccggtccggcaagcggccctcttcccgcttcgtcaacaccagcaatcaggcggaagccctttttgtatgacagtctttcgtatgccgtcatgttcagccactgctctttaagagctttttccttcgcatgctttttcagccattgctctaaaagcgtctgtacgctttttctcggatctttttcacattgggcaaggaaagggtcgctttcgtccctgacctcttgcaggcgttcttttacgctttttacggttaatgtattcacgttctcttctcccttacattatgtatatcggtattctgcggaaaaaataaagacccgcatcgctgcgcgtctttattctgatggtgtttcaaacgaaagcctgccgaatttttccgtccggatgtcccgaatgatgacttctgtggttttatcatagtcaaccagcccgccgcccatcaaacagccgcgtttttcaccgatcgcgtcaaatagggcggcaatgtcttcagggatttcctgaagtccgtagcgctcctttaagcggtcaggataatgctcttccagaaagcgcagtccgaagacggccacatcctgcaggttgataatagtatctttaatcgccccggtgatcgccaggcgcaagccaacaagctcatcttcaaatttaggccataaaattcccggtgtatcgagcagctctaattccttgcctacctttacccactgctgtgaagtggtaatgccgggcctgtctcccgtcttggcaatgttttttttggccagccggttgatgagcgtagatttccctacgttcggaataccgatgattaatgcgcggatggctcttggccttatgccttttgctttcattttatcgaacttatctttcagaagctctttcgaggacgggacgatttgatgcagtccctgcccgttaacggagtttattgaaagagagggaatgccctgttcctgaaaatggtccttccactgggcagtcacagccgcatccgccttatcggctttgtttaaaagcataatgcgcggcttatcttttaaaatctcctcaatcatcggatttctcgatgacatcggtattcttgcatccaccaattcgtatacgatatcaattaatttcagtttctctgttacttcccgtctcgctttagccatatggcccgggaaccattgaatggtcatgtgacttagacacctgccttatttgccggaaccgtatgttccggtgatctcttatgtattttacgttgcttgttctgcttttacaaatttcatataaaaaaagagcctgttacgggtaacaagctcttttcgttcgttatcattatcgtctgatttctttaatacgagccgcttttccgcgaagttcacgcaggtagtaaagcttagcgcgacgtactttaccgtaacgtacaacttcgattttcgcgatttttggtgtgtgtacagggaatgtacgttcaacgccaacaccgtaagaaatcttacgaactgtgaacgtttcgctgattccaccaccacgacgcttgatcacaacaccttcaaagatctggatacgctcacggttaccctcaacaacttttacgtgtacacgtaaagtgtcaccaggacggaacgcaggaagatcagtgcgaagctgttcttttgtgatatcttgaattagtttttgcatcgttttcaactccttccaacagatgctcttagccacaactgcaaggcacagcggaacatcgttttcaagcttttgaaggataagccctcttaagccacaagtagtatcttatcatatcttcactgcccgcgcaatagaatctattcgttttcccactcggaaatccattttctttgctcatcagtaagaggatagttttcaagaagatccggacgtcttaaaaaggttcttctgattgattctttattgcgccattcgtttattttggcatggtttccggacagaagggtctcaggcacttttaagcctttataatctgccggccttgtataatgcggatgctctaaaagccccgtgctgaaggaatcctccatgtgagatgcttcttttcccaggacgcccggcaaaagcctgacaacgctgtcggcaatcatcatcgcggggagctctcccccggtcagcacaaaatccccgatggagatttcatcagtgacaaggtgttcccggatccgttcatcatacccttcgtaatgtccgcagataaacatcaaatgttcctcttccgccagctcctcggctttcttctgagtaaaacgttcaccctgcgggcagacgagaataatgcgcggtttggcgtccgtatcggctgtcagcttttcaacggcatcaaatacgggctgcggctttaacaccatcccggctcccccgccgtacgggtaatcatcaaccgtttggtgtttattatccgaaaaagcgcggaaattgatgacgtcaaaacgaaccgcctctttttcctgtgctttttgcaggatggatgagccgagcaccccttgaaacatttcgggaaacagtgttaaaaagtcgattttcattcgtctattaacccttccattacatgaatcataattttcttctcatttatattaatatcctttaccacagaagcaatatacggaatgagcgcatctttttttccttttctcgcaactacccatacgtcattagctccgggcgtcaagatttcctttactgtgccgatcagttccccgtcctctgatacaacttcgcagccgatgatttcatgaaaataaaattcgtcttcttcaagctctcccaagtcttcttcagggactttgatgatcatgtttcttaggtgctcgacttcattgaggctcggcatttctttgaattgcagcagatgaaactgtttgtgaagcctgtgggtgttgaccgttactttaacaggctccgcggctccttccgcaaacaaatagagcgtattgccgggcttgtaccgttcttcggcaaagtccgttttagaaataacccgcacttcgcctttaatgccgtgggtatttacaattttgcctacattaaaccatctgtttgtcatattatcacctcgggcgaatttcaatcactaccccgtcttttatgacgatggtatttgccgctgttttttcatgccagttatcaccgacgtcaattgaaagcagcgcatcgatctccttttccttcacttcgcttccgagcgggagcgagcgtgtctggcttatttggaaatcgatcattttgattttgtcttgtctcttttcaatggcttttttaaaagattccgccacatcgggattctgctgatctttttcatgttttctaagctgaaaatagagctggctgcattctcgttcaagcgtttgctttttttctgcaaaagaggccaaaagcttttctttactttgctcggtcagaacctgcataacggttaccctgtgaataatctgcatagcaccagactccccactcttccaacatatttctgttcatttgctttttttacgtgtaaaaaaaggggaggtgccggccctctccctttcagtcaaatatttcaaattgaactttcttagaagactgtgcgccagctgcaaaaacgacggttcgaatcgctcttgcagtccggccttgctttccgataattttaccggtatctgacttattgacagataagcgcagcgcaatcttttgatcggtctcttcttttgtgaccgttatgtcttccggatggtcgacaagcggagccacaatgctgacaatcaaatcttccaagttctgatcagtcattacttgccttgtttagcgttgtggaatttttccataattccttggcttgagaacaagttgcggactgtatcagaaggtttagctcctgtttgcagccatttaagagcaagctcttcgttgattttcacttcagccggctttgcaaccgggttgtatgtgccgactgtttcgatgaaacggccgtcacgcggtgaacgagaatctgctacaacaatacgatagaaaggagatttttttgctcccatacgttttaaacgaatttttactgccattttactagcacctccgaaaatatttcaacaagatagtatattaacaatgataaaagtgtttgtaaagtgttttttcttaacaacggttttatcatgtataaccgattacataaaaggtaatttaaagccttttttcttcccttttgacatgtttgtcatctgcttcatcatttttttcatttcctcgaactgctttaaaagacggttgacttcctgaacggatgttccgcttcctttagcgatccgcttccgccggctggcgttgatgatatccggctgttctttttcaagaacagtcattgatttgatgatcgcttccacatgattcagctgtttttcatccacttggatgttttttaagcctttcattttgcctgcgccgggcatcatttgcagcagttcgtcaagaggccccatgtttcggacctgaccgagctgctccagaaaatcatccaatgtgaagctcatcgttctcattttctgctcaagctctttggctttgtcttcatcaacagtcgcctgagctttttcaatcaaggttaacacgtcacccattccgagaatccgggatgccatccgctcaggatggaacgcttctaaagcgtcgagtttttctcccattccggcgaatttaatcggcgtttcagtgactgcgcggatagaaagcgccgcacctccgcgggtatccccgtcaagctttgttaaaacaacacccgttaaaccgagctggtcattaaagcttttggcgacgtttaccgcatcctgaccggtcatcgagtcgacgacaaggaaaatttcctcaggatttgcgacttcttttacgccggagagctcatccatcagttcgtgatcgatgtgcagccgtccggcggtatctaaaatcacgtaatcatgatgctcttccttcgctttttcaatcgcctgtctggcgatttccaccgggctgacctgatcgccaagagaaaagaccggcatatcaagctgtttccccagtgtttccagctgcttaatcgcagcggggcggtaaatatccgcagccacgagcagcggtttgcggttatgttttttgcgcagcaggttggcaagcttccccgtggttgtcgttttaccggcaccttggagcccgaccatcataataacggtcggcgggcgtttggcgacggcaattttgctttcttcgccgcccatcagctcggtaagctcttcttttacgactttaataacctgctggccgggtgtcagactcttcatgacgtcctgtccgacagcccgttcacttacttttttcacaaaatcctttacgactttaaagttaacgtcagcctcaagaagcgcaagacgaacttcacgcatcatctcttttacgtcttgttcgctgacttttccttttccgcggatttttgaaatcgtcttttgcagtcggtcggctaatccttcaaatgccattgtttgccgcctcctaatctaatttctcaagcgcttcaatcagagccgtcattttttcttcttcctgcaagccggaagcaagctctttcagctttgtaaacatttctttacgctcctgaaactttttaaaaaggagcagtttttcttcatattgttcaagcatcgcttctgtccgtttgatgttatcataaacggcttgccttgaaacgtcatactcttcggctatttcaccaagggagaaatcgtccagataataaagcgacatatagctcttttgttttgacgtcagcaacgactgatagaagtcaaacaaatagttcattctcgtcgttttttcgagcgacatttgagctctcccctttgttaagtcaaatccctttacaaaaacatagtttacatggtttcagagcgtctgtcaagtttttatcttgtcaatgaatgcaggtattcgccctgtcagtttgctggtgttttccgccgcttttataagcgaacagccggagcgcttttttgcgcccggctgaaacagactgtctattcttccgctttttcaactaaatccgaaaagagaccgtatacgtaagattctgcatcaaaccgctgcagatcgtcaaccttttctccgaggccgaccagtttcacgggaatatgaagctcattgcggatcgccaaaacaattccgccttttgcggtgccgtcaagcttcgttaacgcgatacccgtcacattcgtcgctttggagaattctttcgcctgcgccatcgcgttctggccagtcgtcgcgtcgagcgcgagcagaacctcatgcggagcctcaggcacttcgcgttcgatgacgcgtttgaccttttcaagctctttcattaagtttactttattctgaaggcggccggccgtatcacaaatcagcacatccgcgcctcttgctttagccgcgtgtacggcatcgtaaataaccgccgcagggtcgcttccggcagcctgcttaatgacaggcacgcctgtacgctctccccacacttcaagctgttcaatcgctccggctctgaaggtgtctccggcagcaagcacaacggatttaccttcattcttcagcttatgggcaagttttccgatcgttgtcgtttttccgacgccgtttacgccgacaagcagaataacgtttaagcgcccgtcctgaatattcaattcagaaatctcttcgttgccgctgttataaatttcgacgagtttttcagaaatgacggactgcacttcctgagggtcctggatgtttttcagcttcacttcttttttgagctcgtcaatcagctccatgaccgttgtaaaaccgacgtcagcgccaatcaggacttcctcaagctcttcgaagaaatcttcgtcgacttttcggtagcgggagacgagttcgttcactctatttgagaaggaatttcttgttttttcaaggccatctttaaatttttcagagacggagtctgtctgtttcgtgattttctcttttaattttttaaaaaagctcatctttcaacctctttcctcgttactgaacgaattcttttgtttcttccagtttgaccgacaccattcgggaaacgccggattcctgcattgtaacaccgtaaaggacatccgcttcctccatggtgccttttctgtgggtgatgacgataaactggctgtcgccgctgtatttttttaagtattgcgcaaacctgaatacattggcttcatcaagcgcagcttccacttcatcaagcacgcagaacggcactggccttactttcaaaatggagaataaaagggcaatggccgtcagcgcccgttctccccctgacaaaagatttaagttttgcagttttttgcccggaggctgcgcgataatgtccacgccggagttgagaaggtcattcggttcggtcagcttcaattcagctcgtcctcctccgaacagggaacggaacacgtcgttgaattgcgaacggatctgtataaacgtttcatggaatcgcttcgacatttcagaatccatttcttcaatgacttgaaacagtgtatttttcgcttccgtcagatcatttttctgctctgttaaaaactgataccgttcgttcactctttcaaattcatcgatgctgccgagattgaccgcgccaagctcttcaattgaaagtttgatcagtttgacccgttttctcgcctcttcaggctcgatttcgagctgatatttttcttttgccccttcaaaagataagctgtactcctcgcgtaaatattgcagcagattatcaagctcaacttccatccggccgagttttacctcttcatctttcagaatttctgttttttgcttgtacagccgcttcatctctttcagctcaagctcattcgtatcaagagcccgctggagctttacgcgctggtcgcgccggctggcaatcaattcgatcgttctcgttttatcgtgaagcttgtgttgagccgcttcttcaagctgctcctcgccgcttgtgctggacgtcatctctgaggtcagcaggcttaaatcttcccgtgtttctttcagagcgagctgcgtttcttcaagctcttttctcagcctcttgagattgtcttcttcactcgagcacgcctgttcttttttcgctgcggcaattttacattctgtcagttcatgagagagcgtttcttttgttgaggatagggtctgcttttgttttgtcagcctgtccatctcttcctcaagttctttcagctggcctgatgcctcactcagctgttcttccagcgctgatttacgcgtctctttgtcccggctgctttccgttagtgatgctttctcctgatcgtaaagctccaggtgggtattgatgttcttttcagcgacttcgagttcatacagcctgccttttacatcctgctgctttgttctgaaagcttcaccgtcttcccggagactgctcagcgtatgttcaagctcttgaatagcctgtttcagtgttttgacctctttttcaagcagagctgttttttcttccatttcagcaagccgcgcagttaccgtctcaagctcccggcttctgccgagcagagaattgtttttctttttgactgcgccgcccgtcattgatccgcccggattaacgacatcgccctcaagcgtcacgatgcggtagcggtgaccgagaagcttggccagttcattcgcgccttttaaatcttcagtgatcagcacggtgccgagaaggttttgaatgacatttcgatatgccgcatcatacgtgacaagcccgctcgctgtgccgagaaaagaaggatgcttcgaagccgtctgttcatcacgggtttggagctggcgcggcttcatgaccgtaagcggcaggaacgtcgcgcggccgaaggaattctgttttaaatattgaatcgctttccgcgccgcctgctcatcgtctgtgacaacgtgctgcgccgctgcgccgagtgcaatttcgatcgccgtttcatatttttgttcggtggaaatcagttcgagaacggcgccgcggatgccgccaagctgctctttctgtttcagcacttcttttacaccttggtaaaaccctgaaaaatcgccctgcatcgtttcaagcatatcttttttggatctggcctgctgtacaaattgatacgcttgatacagcgctgattctttcttttcatactggcgttttttctgttcatatgcggtctggacttcgcggtagcggccgacctgattgtgaatgtccgcttcaacggcggccaattcttcttcgcacgccgctttgcggacggaaatatcatttcgttcctgaagatatttttcattgtttgcggtcagtctcgcctgctgaacggcagattgggacatctggtcatctaaaagctgcagctcgttgcggatcgacgcctggctgtttaacaattcaaagtaatcgctttttaattgttcgattttctcttctacgttttcattatgcagactgagagcctgctgcttttctttcacctgagcatctaaccgtttcacttccgcacgcagcttatcaaagacggcagactgtttttcgatgtccgctttcagttcggcttctttgttcgtgtaatgtgtaacggattcctcaagctgttcccggttttgcgcggcgttttttttgcgctctttgagcacttctttccggccttccagcttttcaagctcttcactggtcacgagcagaacctgctgcagctcgttgacggattcatcaagcgcgtgaattttatctctcgtctcttctatcatcgcttctttagcagatatcgccgatgattccgccaattcttcttcttttgccgcctgcaccttttcttttaaacccgaccatctgccatgcagttcttcgatatcaaaagcggtaagggcgatttcgacatgctcaagctctttctttttttctaagtagtctttggcgattgatgcctggattttaagcggttcgacctgatcttcaagctcgtggagaatatcttccaccctgtttaagttatcctgcgtctcaaacagcttgttttccgcttttttctttcttgttttatatttcagcacgccggccgcttcttcaaaaatactgcggcggtcttccgctttgctgctgagaatctcttcgactttcccctggctgataatggaaaacgcttcttttccgagcccggagtccatgaataagtcaatgatgtctttcaggcggcactgctgattgttgatgagaaattcactttctccggaacggtatacccgtctcgtcacgctgacttcgtgataatcgatcgggagaaaatgatcttcattatcaagtgttaaagtgacttcggcaagattcagccgcttgcgtgagtcacttcctgcaaaaatgatatcttccatttttccgccccgaagcgagcgggctgattgttcgccgagcacccagcggatggcttcggtgatgttgctttttccgctgccgtttggcccgacaacggccgtgacgccttttacaaagtcaacggatatccgttctgcaaatgatttaaatcctataacgtctaaacgtttgaggaacatcccagatcctccttatcgtataagtatctcaatattatcataatcaaccgcttatatcaggcgcatacatattgaaatccccctaggggtacagggggattttattgtttcgtatggtgtttttgcaattttgcaagagcttcctgtgccgcatgctgctcggcttcttttttggaacgtccgttcccgataccgagcgcctcacctttaagagagacaagcgcctcgaattcccggttgtgggcgggccctttttcattgagaattttgtactcaagcgatcctttcccgtcccgctgtacaaattcttgaagctggcttttgaaatccatcacatgagaaaaagcaccatcgtttattttagggaacacgtacactttcaggaattgctgaaccggctcaaggccctgatccagatacagtgcgccgataaacgcttcaaacacatccgctaaaagcgcaggacgctttctgccgcccgtcatttcttctcctttacccaagagaacaagatcgccgaatgacaattcgtgggcaagggagacgagtgacggctcgcatacgatagcggctctcagcttcgtcaaatctccttcactcatggccggatatttggcaaataagaattgggagatcgtcagttccaaaacagcgtcacctaaaaattcaagcctttcattgtcttcatacggctttttccgatgctcattcacataagatgaatgtgtaaatgcttgatacaaaagtttctcgttttgaaaatgaaccgaaatccgttcttggaactctttaaactgctctatttttttatagaacttttttttatctttaaaatgtgagtgttttgacatagtaacctccataggcacatcaggttcaccgcgctccccgccgtaaacggaatcggcagcgcgtacagcgtcagacgccggtaaccgcacgattaaagggctaaagccccgctgtcaggcgggacttttagcatcagcttattgctggttttgtatgtagttcacagcgtcgccgactgttgcaatcttttcagcatcttcgtcagaaatctccatatcaaactcgtcttcaagttccataacaagctcaactacatctagggaatcagcacctaagtcttccttgaaagaagcttcaagtttgacgtcagcttcatcaacgccaaggcggtctacgatgattttcgttacacgctctaatgtatctgccatagcaattcacctcccctcaagtattatagtggattcgtttttaaaaaactagagaaactaggatgaaattttaaaaacaaatctttacatcaccattccgccgtcaatatgaagggtttggcccgtcatataacgcgatccttcagaagcaaggaacgtgacaacgctgctgatatcggaaggttccccgaaacgcgcgagcggaatctgcttcagcatttcatcttggacttctttagaaagcttgtccgtcatatccgtggaaataaagcccggagcaatcgcattgaccgtaatattgcggcttgcaagctctttggctgatgattttgtcaagccgatcacaccggctttggccgccacatagttcgcctgaccggggtttccgctgacgccgacgattgatgatacgttgataatccggccggagcgctgtttcatcatctgtcttgtcacggctttcgtgcagttgaaaacacctttcaggttaatgttgatgacgtcatcccattcattttctttcattctcatgagaagattgtcttttgtaatccccgcattgttgacgagaatgtcgattgaagaaaattcagcgacagcctctttcatcatgttttgtacttcttcggaatttgatacatcagcttttaccgcgatcgcgtttcggcccatagatttgatctcatctacgacttcgttcgctttcgcttcatttccggaatagttgactactacgttgcagccgtttttcgcaagatcaagcgcgatcgcccgcccgattccgcgggacgctcctgttaccactgctgttttttcattaagcatcctgattctcctccttcagcgtttgaatcgccagttcaatggtttcttggtcagaaaccgcgattgttttaaggcggcggttcacttttttcacaaggcctgaaagcactttgccgggcccaatttcaacaaacgtcgtgacgccttcgtcaatcagtttgttaatcgtttcttcaaagcgtacaggtgaatacagctgttcgatcagtttctttttgatatcgtctttgtctgtcatgacgtcagccgaaacgtttgaaataacgggaacagccgcattctttacatcacaggcactgagcacgtcttcaagtttttgcgccgcgggcttcattaattcagaatggaacggtccgcttacttctaatgggatcgcccgttttgcgccgttgttcttcgcttcttctgaagccagctccacgccttttgccgttccggaaatcacgatctggccgggacagttcaggtttgcaagctgtacgagatggccgttttctgtcacttgatccgtcacctttttcaaggactccgcatccatccccagaatagcggccattgcgccttctcccgcaggcacggcttcattcatgaattctccccgttttcttaccgtgtaaacggcatctttaaatgtcatcgctcccgccgcaacaagcgccgaatattctccgagactgtgtccggctgtgaaatccggtgtgatgccggattctttaaacttttccaatacggcaatgcttgttgtcaacagcgcaggctgcgcattgtatgtaagggttaattcctcagcgtcaccttcaaaaatgagcgagctcagctttgtttcaagcgtttcatccgcttcatcaaaaatacgttttgacgcttcttcacgttcgtacaggtcttttcccataccgatatattgtgatccctgtccgggaaataaaaatgcaatcttactcatgatgcggtaacctccagactactcatctgttttttcttcttttacttcttcttctataaatgcggccacgttttggctcaccatttctctcgcctggcgcaccgcgtggtaaacagcgcgtgcgtcagaagagccgtgcgctttaatcacaggcgctttcagtccgaaaagactcgctccgccgtactcagaatagtccattttcagtttcatttccatcagcttcggctttagcactcccgctgccagcttagaaacaaagcttgacgtcagtgtatctttcagcattttgaaaatcgataacgctgaaccttccaatgttttcagagtgacgttgcccgtaaagccgtctgtgactatgacgtcagcagcgccttccagcaagtctctcgcctcaacgtttccgacaaaattcacgtttgtttcttttaataattcaaacgtcttttttgtcaggtcgtttcctttcttttcttctgtgccgacatttaacaagccgacgcggggcgagctgattccgagaacctgccgtgcatatacagatcccataattccgtactggacaaggtgttccggtttggcatcgacattggctcccacgtccaaaagaaggaaaccgtcccctgatacggtcggaagcgtcggcgcaagagccggccggtcgattcctttaattctgccgacgataaacagtcccgctgtcatgagagcgcccgtattccccgctgagatgcaggcgtccgctctgttttcagccacttcctgcgccatcagcaccatagaagagtttttctttctgcgtacggcgcggaccggttcatccgtcggttcaatcacttcatcggcgtgcaatacggtgatgcggtctgatgttgttggcaagtgtgattctatcgttgtcttgtcaccgaccagcgtaatatgaatatcgtcaaaagcctcaatactcttcattactccgtcaataacagctttgggtgcgttgtctcctcccattgcatctacagctattctcatgcatgctccacctttatgattgttttgaacggtacatgtcaaagatgccggagaacacgacttcttctcccacatagctgttgacttcaactaccgttctgcctttttctttttcgactgccgtcactttggctttcgcaacgacgcgctcgccttctttcacctgtcttgtaaagcggatatttgcgcttgcggtcagcgccagctcatcatcaatgacggctacggcgagtgagttcgcctgcgcaaacaaatgatgcccccgcgcaatttgattgcggctgaaaacatgttcgcgtcttacttctaatatagaaatggcctggccgtcaagctccagatcaatgatttcaccgatcacttcatctaacgacagtgatttcacttcatcatcaagcgtttgttctgccacgtttttaattctttctctcagctccggtattgagagctccaagcggtctaagcggatcgtctgaatgctgacgccgaaattccccgctaattcttcatctgtgatgaagggtgtcgatttgatcgtctgctgcaataatttttggcgttctttcttgcttcttctcatctgtaaacaccatccggacaattaagactaggtactaatagtagtatataatttcatagattggaatgcaatgattgttttttgaaagccgcccaattttgcagaatcagcttaatttctccccttctaagacaccgcttgagagcagttgagcgcggagcatgcggtactcgtcatctttccaaaaagcctctgatgacaccagattggccgcatcctggcgggccgtttccaaagctctgtagtcatgaaccatatccgccaccttgaactcgggcataccgctctgttttttcccgaagaaatcgccgggaccgcgcagctcaaggtccttttcagacagttcaaagccgtcgtttgtctccgacatgattctcatccgttctttcccggtttcggatttcggatcggccatcaagatgcagaaagactgatggtctccccgtccgacccggccgcggagctgatggagctgagacagcccgaaacggtcggcgtcatagatgaccataatcgtcgcattcggcacgttcaccccgacttctacgacagttgttgacacaagaacctgacattgattggcgctgaattctctcatcacctgatctttttcatcagaatggagcttcccgtgcatcagaccgacattccatttgccgcggtaaacctcagacagcatgttatatacgtcaatcgcattctgaacatccagcttatccgactcttcaatgagcgggcagataatataggcctgccttccctgcttcagctctttttcaataaaagccaaaatccgctccagcatgtcgtgtttcacccaatacgtttcgatttgttttcgtcccgcgggcatttcatctataacggaaacatccatttctccgaagacggtaatggctaatgttctcggtatcggggtggctgtcataaacagcacatccgggtcctggcctttattcctgagttttttgcgctggtcgaccccgaaccgatgctgctcgtccgtaatgacaaggctcagcgctttaaattccacttcatcctggattaaagcatgggtccctactaaaatatcaatttctccgagagcaagccgctccaaaagctctctgcgccgctttcctttaacagaactcgtcaaaagcgcgatgttcacatcttcatttgcaaataacgatacgagagagtcggcatgctgttcggccagaatttcagtcggcaccattaaagccccctgataccccgacaggatcgcagcgtacaaagtgatggcggcgacggccgttttccctgacccgacatcgccttgcagcagacggttcatacggtaaggagatgtcaaatcagcggtaatttcacggagcacgcgcatctgtgcgttcgtgagcgaaaacggaaggctggctgtaaaagcggcgagcttttcagccggaaacacatggctgatgccttttgactgttctctttccgctttacggaacgcctgcattttcagctgaaataataagaattcttcgtaaacaaacctgcgtcttgcctgctgtaacgattccctcgtttccggctggtgcatcgtctgcagggcttgtttgtaatcaggcagcttgtaactgattctcaatttttcaggaagcggatcggcaatattgtccaaatggtgcttcaaagcttccttaataaaccgcctcatcattttaacggtgacgttttctttaacggaataaacaggctcaatgcttttatcttcttgatgaggcccgttttttaattcctgcacagaaacggtctgcctgtgtttatcccatttcccggatatcgtgacgacagaaccgagcgtcagtttcttttttaagtacggacggttaaagcagaccgcggtaattaaataattgccgacaagcaccctgaatgtcagcctgtttcgttttttgccgtaataggtaagagaaggttctgaatgaaccttcccttctactgtaactctttcttcatgtttaacttcttccaaatccctcagctcatagtcatcataacggtaagggaaataattcagaagatcagaaatgtcatagatacccaattcttgcaatgttttttctgtttccggcccaatgcccttaatctccgctatactagtttgctgatggtgtttcacttgatttcagcgctcctccgaaaattttcttctctaattctcttcccgtcggtgtcgcggctaaaccgccttgtcccgtttcacgcaatgctgtcggcatcgtctggccgattttgtacatcgcgtcaattacttcatcgcaaggaattcggcttgtaattccggccagcgccatatctgccgcgatcattgcgttggatgctcccattgcgtttcgtttgacacacggcacttctaccaagccggcgaccggatcacatacgagaccgagcatatttttaagcgtaatcgccattgcttctgctgattgctgaggcgttccgcccgccatttccacaatcgcagcggccgccatacctgatgctgatccgacttccgcctgacagcctccggcagctcctgaaatactcgcattatttgctacgacaaaaccgaacgctccggccgtaaacagaaatcggatcatttgttccgtcgtggggttcagcttatgctttacggcgaataacgttcccggcacaaccccggcagaaccggcggtcggcgtggcgcagatcgttcccatcgccgcattgacttcatttgtcgccacagctttagaaacggcgtctaaaatcagattgcctgacaggcttttacccgattggatgtatgcctgaagtttcacggcgtctccgcctgttaaaccggtctggctcgtgacacccttcagccctttttcaaccgcagcttccatgacggagagattacgctccattccttgaaagatttcttcccgtgttttttgcgtcacttccatctcttgagtgatcattacttctgaaatcggaatctgtttttcttgagtgatttctattaattcttttacattacgaaacatgtcattttcctcctgactttttagtcagctatcttagtaacctgtataatattcggaagtgttgaaagttcgtccagcacttcttcttcaatattctgatcgacttcaatcgtcatcagcgcaagctgtccgacatccttgcgcgccacttccatatgtccgacgttgatggagaatttcgcaagcacattggcaacgcctgcaatcgtgccgaatttatcattatgaacgactaaaatagccggatggtttccggaaagacgcagctcaaaaccgttaagctccgtaatttctatttttccgccgccgattgaaataccggtaagggcaagctccccttcatcatcagaaatgacgatacgcgccgtattcggatgaacgggcacagcatcctctgtgcggaactctatatatatgcccttgtcttcagcaatttgaatcgctgttttaatccgctcatcaaatgtatcaaaatcaagcaggccgccgataatcgcgacatcagtgccgtggcccttatacgtttctgcaaatgatccgtaaaaagacacaacaatccggcggggctcccgcctgaataagcttctggccactctgccgatacgggcggcgcctgcggtatgtgaactggacggaccgatcattaccgggccgataatatcaaaaacgcttctatatttcatgctggtttgttcctccttaacatcacttgattcagcgcttttctttagactaattgaacatttataaattggcaagcaggcgcactgccgcactgccgcaggtaaatataggcataagaatagaagggcctgataagcccttctattctgccgcaattatatatgggtacagaggctgtctgccgttatggatttcaacctcgatatcttcacagacgcttgtaatatattctgcgagtttctcagcttcttcttccggcgcgtcttctccgtacaggatggtgacgatttcatcttcttccccgatcatttcatccagcagcaatttcgccgcacttatccgatcttcggcgctgccgataatcgaactgtttaaaatgccgataaaatcaccttttttaatatcctttccgtcaatatgggtgtctctgactgaatatgtcacctgtccgcttttcacattccggatggcctcaagcatattggcttcatttacatcagccggctggtcagggttaaacgcaagcagggcggtcataccttgcggcaccgtttttgccggaatgacaattacattttcttcagccacactcgccgcttgattggcagccatcacaatatttgaattgttcggaagaatgaaaaccgtttccgcattgacagactgaacggcttccacaatatcttccgtgctcggattcattgtctggccgccttcgattacgtgtgaagcgccgatgctcgtaaacagttcagaaatgccttctcccattgccacggtcacgattccaaaaggcttgcgggcttctttcataacgccggccggctttttttcatcatgttcttggctgataatggaagtatgctgctccctcatgttttcaattttgattttaattaaatcgccgtaacgctgtgcaagattgagcacgttcccgggttcttcggcatgaatgtgaactttcgccagcgtatcatcagctacaaccagcaatgaatcgccgtaacggctcagttcgtttctgaacgtttcttccttgaacgtccgtttatcttgatccagccttaccatcacttccgtacagaatccgaattcaatgtcttctgtactcagcatgctctgcgcgcttttatgatgctcggcattcaccatatcatccagagccggaagaaccgcttttttcggtacggactctccttttaaggaggccaaaaagccttcatatacacaaagcagaccttttccgccgctgtcaacgacaccgacgtcctttaaaacaggcagcaggtccggcgtgcggttcagcgacgcttccgcttcttcaataacagtctccatgaccgcaatgatatcggtttcttctttggccgaggcgaccgcttttttagccgcatccttcgccacggttaaaatcgttccttcaaccggtttcatgaccgccttatatgccatatccactcccgcttggagtgcagcggcaaattcttgggcgtttatttcttttttgttttcaatgctctttgtgaagcctctgaataattgggacaagatcacccctgagtttcctctcgctcccataagcaggccttttgacagggcgatgccgactttgccgatgtcaggtgagtcaaggtgctctacctctcttgcacctgatgacatcgataaattcatgtttgttccggtatcgccgtccggcacgggaaacacattcagcgcatccaccgcggatgcgttttgagacaatgtctcagcccccgccagaatcattgccgcaaaagctctcccatctaagtttcgtctagacaatactcatcctcctcactacgggttcgttactcgtacgccttggacataaatatttacagaatcaactgcaagtccgattgtttgatttactgtgtattttaccttcgtctgaacattgtgagctacttcggatattttagtgccgtagctgacaataatgtacatgtcgatatgtatttgttctgattcctgacggacatgtacgcctcttgcgaagttctctttccggaggatttcagacaaaccgtctttaatctggtttttggaggccatccccactattccgtaacagtcaatggcagcgcctccggcaaccattgcgatgacttcgttggatatatcaatctgtccgtattttgtcttcatttcaatggacacacaggttcctccttcaggtgcatagagttatcattattctactatatgtatcccattatgaaaagaaaagatacagaagcggcgcttcagcgcgggagatgtgattggttttacatgtcaagtgatttttcttgaaagtaagggaaacaatagttgcaaacggtttttagctgtggtaaattatttaaagtattgtataacgaaagcatctgagacactatgtttgaaaagatgtttcgcgcagttaggagggaaacaaatggcacgtaaatgttttattacaggtaaaaaaacaaaagccggaaacaaccgttctcacgcaatgaacgcttctaagcgtacttggggcgccaaccttcaaaaggtccgcatcctcgttgacggcaaacctaaaaaagtgtatgtatctgcccgggctttaaaatccggtaaagttgagcgtgtataagcaaaaatgaacgcctgcccttttatgcggcaggcgttttttatgcgttcaaagagggcaattcagcttcttgggcttactcttttctaaatgagcccagcatcgcccggacaattcctcctaaaaacttcggcaatttaatggtataaaatttcattttgtcccctcctataagtcccgtatccgctgcgttcatcactttaggattcatggttttttccgcatatggcagaagccgcttttctaatccgcgctccttaccattattaatatgccttttgcaaacgaaaaagtacctcgtgaatgaatgagttcgttactaatacatagtgtggaacccaggggaatatgacaattatccaggggatatttaaaaccgatgagtgtcaggccgtctgcggcttccgaaaacggaataaaagaaatatagcgtctgcgcactttttcttcaattgtatagcggccgggttcgaacatctgaatctcattctgccggtcgatcagcttgacaaccgtatccttatttaaagctttatacaaaagctgaatgttccctaaaaagtgatctgctcttccgcccgtcacaccgaatatccgaatgttctccggttctttttgtaaagcccagtcaagagcgagttcaagatcggtataatctttttccgcctgatacacatggagggccggcgccgctttttgaatctgcaggagctcttcttccgtaatgctgtcaaaatcaccgaaagcttcctgcggaacgattccggcctccaaaagagcgaccgtccctttatccactccgacccacgtcgtatctccgtctgtgtactcggacagatcgggaataaactcccgagggccgcccgcaacgatattgattgtcttcatatgttttcctttccctctcagacgcgaaaagagccggcggctttcaccgggctctttatcagcatgtttattctgcgtttcggatctcagcgatggcttttttccgatccggctgattatatacggcggacccggcaacaagcagattagcgcccgcttcagcgcataaaggagctgtttctttattaacgcccccgtccacctcgattaaaagttcagagaggcctttctcctctgccatctgtttgacttgacggattttcggaagaaccgagtgaataaagcgctgacctccaaaaccggggttcaccgtcattaacagcacaaggtccaactcatcgatcacatgttcaatgatttgaacgggcgtatgcggattgagcacaactcccgcttttatcccctgctcttttatcaattgaatggtccggtgaagatgcggacacgcctcagcgtgaacggaaaggatgtccgcaccggcttttgcaaatgctgggatgtagcggtccgggttttcaatcataagatggacatccagcggcagatcagtcactggacggacggcttcaacgataagcggtccgattgtaatgttagggacgaaatggccatccatgacatcaatatggatatagtccgctcctcctttttccacgtctttaatttcctcgcccagtgaagcaaaatcggcggaaagaattgatggcgcaaccttaatcatattaatacctcggctttctctcttttatttcctgcataaattctttgtaatgctcatagcggtacggctgaatgtctccttcttccaccgcttgctttaccgcgcatttcggctccttcagatgcagacagcctctgaatttgcatgaggcgcttatttctctgatctcagggaacgtgctgcccagctcttcttcctcaatgccggtgaattcaagcgaactgaaccccggagtatccgccacaagaccgcctgatgtatgaatgagctctacatggcgtgtcgtatgtttcccgcgtcctaaatgagtggaaatctcgtttgttttcagctcaagctccgggctgatcgcatttaaaagcgaagattttccgactccggactgcccggcaaacaccgtggttttattcgcgaagtgtttcacaatgcctgttaagccgctgttttcttttgacgacgtcacatatacgtcataaccgatcgcctgatagtctttcatgtaagatagaatcttctctttcgattccccgtctgaagctaagtccatttttgttatgcagatgatcgggtgaatgccgttggcttccacaagaacgagaaaccggtccaataaggacgtgctgaacgccggctgaacggcggaaaagacgagaacggcctggtccacatttgatatcggcggcctgaccagctcgtttgttcgttctttgatttccaacaggtagccttctttatcattttcagcctgataaacggcataatcgccgaccagaggcgttattttattctttctgaaaatgccccggcctctgcattgaatgatcttgtcctgtgattcatccaggacataatagaatccgcttaacgctttaataattttgccctcaggcatacggtccctccttgtcagtcattatctttcgggtattcaatcgttttgtagctgacgactttatgatcgaccatcacttgataataccccttctgtccctgatcaatcttcagttcaattgttttttcagtcggttcttttattttaaacgaatcatacgtatcagagatgctgtggtctttatcatcgatggcgatttgcacttcgagctcgtccccttcatgttcgggttcgtaggggatgctgattttttcttttaccgttttggccggtttttcttcaggcccgagcgaaaacgttacttcaacatcacttcccggcttaaccgcagtgccggctgacggctcttgcttcatgacctgtccctcaggcacgtcatctgagtgagcttccttttcaacaagctgcaggccgttatcttcaagatacccggaagccgcttctttgctgtatgtttttaagtctctcagcgtaacgtccgccggtccgaggctgactgttaagctgacttcatcatcacttgcgaccatgtcggtgccggctgatgggttctgatcaattacagtgccagccgcactgtcatcgttctcttcttttacattgacatgtttgaagcctttatccttaagcgtttttttcgcatcatcgatcggccggcctttcacgtcaatcagccgggttttcggtttcccgatgcttttgtacagttttacagaagagccttctttaacggcagaacccgctttcggatcagttttgaccattaatccctcttcgattttttcatcttcaatgtccgtcatatcaggatccgcttggaggccgttcttttcaagcagggcttccgctttttcgtacttcatgccccgtacatcggggacgcttacctcttttggcataaacaaagacgggaacacggtgaccgcaagaacagccgccattatgaaaataaagcagacagccagcaaaacccacggccatttccgtttcttctttttggcggacggctgttctttatcatccgtctctgccggcgtttccgcctgcggcgcggctatcgcaccgtcagtaataacgggaatcgctttcgtcatttcctcatcatcctgcacggagaatttttgttcattcagcctgccggcgtcaaaagccgttctgatgtccgcttccatgtcctctgcgctttcatagcggtgaaacgggtctttggcggttgcctttaaaataatgttttccacgctctgcggaatggaagggttccactttctggcggaaggcgtttctgcttgcaggtgctttaacgcaatgctgacggctgattctccgtcaaaaggcattttgcctgttaaaagctcaaacagcacgatgccgagcgcgtaaatatccgattttttcgttgccagaccgcctctcgcctgctccggagacaaataatgaaccgagccgagcacagaattcgtatgtgtgattgtcgtcgaagtgagagctgtggcgatgccgaaatccgtcaccttaatatgtcctaaatgatctatcaaaatattgtgcggtttgatatcccggtgcacgatatggttatgatgggcatgggcgatggctgagacgatctgctccataacagacagcgcttctttcggatgaagcggtccgtgtgcggttatgtattcctttaacgtcatgccttccacatattccatgacaatataataaatgtcgccttcctccccgatatcgtaaatactgacgatattcggatgatcaaggcttgatgccgactgtgcttctcttctgaaacgcctgataaaatcaatgtcattcacaaagtcaaaccgcagaatcttaattgcgacttcacgttcgagaatgatgtcctcagctaaaaaaacgttcgccattccgccgccgccaatgggccggaggatatgataacgcccgctgatccgcttgccggttagcacttgtcttcaccctcttttgcatctgcggaaagctcaatcaatacagccgtgatgttgtcctcgccgccgttttgattcgctttgctgatgagaaggtctaccttttcctgaggcgcagattcggcttgaagcatttgtttgatctcgtgatcttctattttatttgacagtccgtcagagcataaaagcagctgatcgccgtcagaaagctcaaacgaacgggcgtcggggctgatggtttcatcagtccccagcgctctcgtcagtacatttttccgcggatgatgctcggcgtcctcttttgaaatttctcccgtcttgaccagctcattcacaagcgaatggtcttcagtcagctgagtgaattccccgtcttgaagcaggtagcaccggctgtctccgatatgggcgacagtgacaaatttccccgtgaataaggcgcagacaacggttgtgcccattccccggcattcttcattcgctttagcgtggtcatataccttggcattcgcctcatgaatccggtctttcagccaaacctcgcaatcagatggcagtgaaggaaccgtttcagcttggttccactgctcttccatcgctgcaaccgccatcctgctcgccacatctccggctaggtgaccgcccatgccgtcggcgacaaccgcaagcgccgcttcttcttttgtgaaaatgcccgccgcatcttcattatgctggcggactttacctgtatctgttttcaaggctgtaatcaacctcttcacctcgtctcgtcttgacgctccttcgcgcgaagctgaccgcaggccgcgtcaatgtcatggccttgctctcttctgatcgtgacatttacaccgcgggattttaacgttttttcgaatgcgaaaatctgatctctcggtgtgcggacgtaatcccgttcaggcacatagtttacaggaattaagttgacatggcatttaacgccttttaacagttctgcaagctcttctgcgtgttcgacctgatcatttacgcctccgaacaagccgtattcaaagctgatccgtctgcctgttttctcaatataatatttgacagcttccataaggtcaggaagcttataagctttgttaatcggcatcaggcggcttctgatctccgtattcggggcatgcagagaaatcgcgaaattgatctgcattttttgatctgcgaaatcgtatatcttcggaatgatgccgcttgtggaaaccgtaatatgacgcgctccgatgttcagccctttatcatggttaatgatttttaagaaagcgagcatttcattgaaattatcaaacggctctccgatacccatgataacgactgagctgacgcgttcatccgtttcatcaagcgccttttgcactttcacgacttgagcgacgatttctcccgcttcaagattccgtttcaatccgccgagcgttgacgcacaaaatgtgcagccgatgcggcagccgacctgtgtcgttacacatacagaattgccatactcatgtctcattaaaaccgtttcaattgtataaccgtcatgaagctcaaataaaaatttcattgtgccgtcttgtgacgtctgctttacagccgttttcagcgttgtcatcacaaaattgctctcgagtttttcacgcaggctttttgaaaggtttgtcatttcatcaaatgaagacacccgtttttcatacagccattcaaaaatctgtgctgctcggaacggtttttcgccattctcggtcagccattgtttgatttcatctaattcaaaagagtaaatggacggctgctcagtccgcagctctttccgtacgcttgtcttttttaattgtgtcattttttatcccttctttctcatgctgctaataaagaaaccgtctgttccgaaataatgcggaagaatttgaaggcttccatcctgaacaaagggtctcgccttttcaggcagccgcttttcaagagacaaatcgggttcaaactcagggtgttcttgtataaacgcatgcataacttcttcattttctgtccgatccattgtacacgtactgtatacgagtgtgccacctttttttactaatggggcgatttcccttaaaatgccgagctggatctctgacagccgtctgctgtcctccggcgtcttcgtatatttcatatcgggttttcttctgataactccgaagcctgagcacggggcatcaacgagaatccggtcaaaccgttctgcgccaaaagcgtcccccgctttccttgcatccatcgtttgcgcgtcgatgatcgtaagtccgagccgttctgctccctcttgaatcagcttcactttatgtcggtgaagatcaagtgacgtcaggctgccttcgttcttcatcagttccgcgatgtgagccgactttcctcccggtgcggcgcatgcgtcaagcacggtttcccccggtttcggatccagcgcccgcgcgacaagcattgagctctcatcctgaatggatacttgcccgttttggaaaaattccgtgctcgcgatgcttccttttaaaagcttaatcgcatcaggagaaaggtctccggcttccgcttccagaccagcattctccatctcattcagcagcgtttccttgtcagccttgatccggttgacacggagcgtctgtttcggcggaacgagatgaatccggcagatcttttcagccgtctcaaagccgtacgcttcgacccactcttttacgagccattcgggatggctcgtctctgttgaaagacggagaaccgggtcttcgatttcagcgaatgacggcgccccctcacgctgcagagagcggaggatgccgttgacaaaggatgcgatgcccttatgcccgcgttttttggcgatttcaaccgcttcatggatggcggcgcggtccggaattttttctaaatactccatttgatatgcggacagacgcagcagctgaatcacccatggcttcaccttattcggcttgcggataaaaggcttcagcatatagtctaaagcgattttattttgcagcgttccgtagacaagctctgtcagcagtcctcggtcctgatcgctgagcgtgttcgttttgataaccgatgtaagaagcaggttgctgtatgcctgattttgctcaagcttttcaagcgcttcaagggcaagctcccggacattaattttcttcatctgctgctcctaacacgtcaccggactgcacatttttgcctcttacaaaatcctcgcccttcatccgtttttttcccgccggctgcagctctgtgatcaaaagggcggtgccgtttcctgatgcaacgacaatgccgttttgctccgcacggatgacagttcccggcgctgcttcagtattggccgcaactttttcagatgcccacactttgatgttttgtccgttcaacgttgtataggcgacaggccaagggtttaagcctctgatctggttgtaaatgtcttctccgggctttgtccaatcaatccgctcctgctcgcgcttaatgttaggcgcgtaagtcgcttttgattcgtcctgcctgatcggtttaatatttccggaaatgacgttcggaacggtctctgacaaaagcttcgcccccgctacgcttaatttgtcgtggagcgtgccgacgttatctgtttcatcaatttccacttcgattttagaaatcatatcgcccgcatcaagcttttcaaccatatacatgatcgtcacgcccgttttctttttgccttgaagaatcgaataatgtatcggcgctccgcctcttaattcaggcagaagtgaagcgtgcacgttgatacagccgtatttcgggccgtccagcagctgcttgggcaaaatctgtccgaatgccgccgtaacaatcaggtccggcttcaggctgagcactttttctatttcttcttcaagccttactttttcgggctgaagcacgggaataccgtggcgttcagcttcagcctttacaggaggaggcgtcatgattttttttctgcctttcgggcggtcaggctgcgtaacgacccctgccacttcatatccgtcttcaataagtgtgcgcagcacgggaactgaaaagtcgggtgttcccataaaaacgatccttgtcatccaatcatccttccatttctgccagttcttcttcagtgtagtaagccgtgatttttgatgtgaataaaatgccttctaaatgatccatttcatgctggatggccctggccaaaaaaccttccgcttctacaataaacggttttcctttacggtcataagctttcacctttacgtaatcggggcgggtgacctcaccgtatactcccggaaagcttaagcagccctcgactccgatctgttcaccgctcttttcaagaatgaccggatttacaagatcgatccggccgctttcttcaccgatatccacgacggccgctctttttaaaatgccgatttgcggcgcggcaaggccgacgccatccatttcgagcatcgtatcgtacatgtcatcaagcagtttttttaattttttatcaaacactgtcacttcttcggcaggtgtttccagaacctccgccgggtgtgtgacgatttttttcacagccaaaattttgccctccaaaactaatgttacatcagcatgtacggattcatatcaattgaaatcattacatgcttttgcgcaatgtcgcgtttataatgctccagaatttttttcaactgaatctgcaactcgttttcctgtctgtattttatcacgcattgatagcgatatctatctttgatcctggcaatcggggaagccgccggcccgagaattttcgtgtccggtccgcatcccgctcttaaatagtttgtaatcttttcagcggtgaccgcggcttttgcggcttcttcatgagaaacggtcaccagcgccacgtaataataaggcggatatgactgggcccgcctgtgcgccatctcctgctgaaagaaagtttcatagtcatgcgttttcgtcagctgaatgctgtaatgagacggtgtgtacgtttgtatgactaccgttcccggcttttcatgccgcccggcccgtccgcttacctgcgtcaacagctgaaatgtcttctccgccgccctgaaatcagggatgtgaagcgtcgtatctgcgcttaatactccgacgagcgtcacgttcggaaaatcaagcccttttgcgatcatttgcgtaccgagcaggatatccgcttttccttcaccgaaagctgacaatagcttttcatgagcgccttttcttgaggtcgtgtccacatccatcctgatcacgcgcgcctgaggcagcactttggtaagctcctcctctacacgctgcgttcccgtgccgaaaaagcggatatgctcactgccgcattccgggcacgttcccggaacaggctcctcatggccgcagtaatggcatttcagcctttgtccgtagcggtgataggtcattgaaatgtcgcaatgcggacattggggcacataaccgcagtcccggcacatcacaaacgaagaatatccccgtttattcagaaagagaacggcctgctcttttttcgcaagcttctcctccagctgttccatcagctcttttgaaaacatcgatctgttgccgtttcgcagttcttctctcatatcaacgagagatacatccggcatgagctggcgatttacgcggtgttttaacggaagcagctcataaacgccttttttggcccgtgcaaatgactccaatgtcggcgtggcgctcccgaggacgaccggacagctgtgatgctcggccctgcggatggctacgtcttttgcatggtaccgcggcatttcctcctgcttataggaggattcgtgctcttcatcaataatgatcatgccgagattttcaaatggggcaaagatagccgatctggctccgacgacgagctttacttccttacgctgaattttgcgccattcatcgtatttttcacctgttgataatccgctgtgcatgaccgcaacctgtgagccgaagcggcctttaaaacgattgaccatttgcggcgtcaatgagatttccggaacaagcacgatggcttcttttcctttagccagcaccttttcgatagactgcaggtaaatttccgttttgccgctccctgtcacaccgtgaagcagaaagacgtgatgaacatgatcggctacggccttcttaatcggctcaaaagcggcatgctgctcttcagtaagagagagaggctctgtttttttgaacattctgtcctgataaggatcgcggtaaacctcctcaaagctttccgtaagaagcccctttttaagaagcgttttcagcgtcgctgaactggaatcggtcttttggcaaaggtcagccgcggaaatttttgctcccccgtcaataaaataagtaagcacggcaagctgtttaaaagcctgttttgtcaatgaatctgcgtgccgggcgagttcttctttgtctgcccccgcctcaatcatgcggatcatttttttattcgttttctgggcgactttataggtgacatcaatgcttcctttgcgcacgaatttttgcagtgccgaaagaatacgttcatcggtaatatctgagtacagaaggctcttctgatttctgaaaagctgcctgatgtccggtgtcagcgcttcttcgtcaacgactttcagctctttctcgtacttcgccttcagtgcggccggcagcattgcctgtagtgccgtgattttaaacgatagcgttttgtcagaaagccatgaagacagctgcatcagctcttccgtcagaacgggtgtcaaatcaagaagcttctcgacttccttcatttgcccgccgtttaattcagacgaatctttcaaaccggtcacgaacccttgaagcttgcgcgggccgaacgggacaatcacccgcatgccgacttcgatcatccctcttaaatgatcgggaattttgtaatcaaagggcctgtcaatgtttttggagctgacatcgacaatgacttctgccacattcatacgggtttttggtcctctgctttcaaagcggtcatttccttcagcatttcaaaggaaacgtcaagtttagacataagcgcaagctcccgttttcttccgtcccggaaatagaaggtgacgacattcgtatctgtgccaaaccccgctccttcggctttcacatcattcgcaacgatcatatcaaggtttttctgttcgagttttctgcgcgcatagcgttcgacgtcttgcgtttcagccgcgaatccgaccagaagctggtgtgttttccgttcgcccagttctttcagtatgtctgccgtacggttgaattcgatcacgagtgaaccgtctttcttcttcattttgtgatcagaaacagccgccggcgtaaaatcggccacggccgccgtcttaatcacgatgtcgcatgaatcaaacacagaaagcacggcttctctcatatctgctgctgattgcaccggaaggaactgatacagcccccgaggcggctctaacgacaccgggcctgaaatcagcgtcacccgcgcaccgagacggacggcagcttcggcagcggcatagcccattttgccggtggatttatttgtgaaaaaacggacggggtccactgcttcgcgcgtcgggccggctgtaatgacaatatgttttcctttcagcggcgcatcgtcttcaggtttcttaaaatgctctctgacacgctcaacaataagctccggctcctctaatcttcctttgccgacatatccgcatgccaaatagccttcactcggctcgataaagcggacgccgtcctgataaagcacggagatgttccgcttcaccgccggatgatcatacatatggacattcatcgcaggcgccacccagaccggggcctccgctgccagcaccgtcgttgtgagcatatcgtcggcaattccgttggcaagcttgccgatgacgtttgccgtagcgggtgcgacaatgattaaatccgcccagtcagcggcatctatatgcgaaataaccttcggattttgttctttaaatgtatctgtatacacttcattccggctcagcgcctgaaatgtcagcggagaaacaaactcacgcgcggactcagtcataatcacttttacgttcgcaccggcctgaaccagtttgctggtaagcgcagaagctttataaacggcaatccctccgctgacgcatagcagaatgtttcggtttttcatgaagtcttctcccctttatgaaaacattggacaaatcctaaacggaaaaaaataacaacctatgtagagataggttgctacgtgtgcttgttattcgctgtcttctctttcaaacgaaagcaggcccgcgtcaatttcttccaaagctttgcctacatatttgtgagaaatagtatgttcaatctgctggtcttttttgatctgcatttcgcgcgcgcgtcttgcagacacagtgaccagcgtatatttagaatctaatttattcattaaagagtcaattgacggatctaacataagttattctacctccagcattttcttatatctcggagcaacgcgttcacgctttaagtgctcggcgagaacaattgcgttaatcttatcacaagccgtttggatatcatcgttttccacgacataatcatacgcgtccatcatttcgatttcagcttttgcggccttcattctgttttcaattaaatcgtcggtttcagttcctcttgtcacgattctgtttttcagctcagaaagactcggcggcgctaagaagataaacaggccttccggaaatgcattccgcacttggagcgcgccctgcacttcaatctctaagaagacgtcttttccttcttgaagcgtctgttcgacataatcgacgggcgttccgtaatagttgccgacatattccgcccactcaagcagtttgttgttttcaatcatgcgttcgaattcatctcttgatttaaagaaataatcgacgccgtcgacctcgccctctctcgggtttctcgtcgtgactgaaattgagtattcaaatttcgtgtcttcttgtgaaaatattgcttgccgaaccgttccttttccaactcctgagggacctgagagaacgattaataaccctctttctttcatgcggcaattacccctgcccttcatccataatttcttctttcacagaaagtctgtgtgcaactgtctcaggctggacggcagataagataatgtgatcactatccatgacgacaactgcacgggttcttcgtccgtatgtagcgtctattagcattccgcggtctcttgcatcctgaatcattcgctttattggcgcagactccgggctgacaatcgaaatcatccgattggcggagatgatattgccaaatccgatattaatcagtttaatcgtcatcttctacgttccccctgtaaaatagacgtctctagtgtaacccgaagagaccgtctgtaaacaatacgcacagtcgctattctatattttgcacttgttccttcaatttttcaatagaacttttcatttccacgacaagctttgtgatttgatgatcattggcttttgagccgatcgtgttcgcttcgcggttaagctcctgcacgaggaaatcaagtttgcgtccgactgccccgccttcttttaatatatcacggaattgaacaaaatggctcttcaatctggtaatttcttccgtaatatcagaacggtcggcgaaaatggcgcattccgtgaccagcctgctttcgtcgagtgcgtcctccgtccattccttcatgcgggcgtaaaggcgctcgcggtaatgcataacaacggccgaagcgcggtctttcacctgttcggacagcgtctcaagccgcccaatgtgcagaaaacagtcttccgccaaaagccggccttctttttccctcatgtcacaaagttcctttaccgcaagttcagcggcttccctgatgacttcttcaagcttgtcatcacgcatctgctcttcgtgaatctgcgcaatatgttcaaaagtaaagaaatccattgcatcgggttccgcggccagactgtagcgctctttcatgacacgtgcggcgctcacatattcatcaaggagctcccaatcaattttcaggcttctttttatgagcgcgtcactgtttacagtgagaaacagctctactcttccgcgctgtatatgctgcaatatcatttgtttcagcttatcctctacatatagcaaaggccgtggcagacgggcgttcacttctttgaaccggtaattgacggatttcaattcaacggttgccgagagatcgccttttgtgctgcttgcgctgccgaagcctgtcatactccgtatcatatgaaacacccaattctttcccgttatcaaaataaaagggcaatagacatgctattacccctaagattatatcatatggaattatttttttcttgtcaaaagtgaacccgccagcaaaaaagtaggtatgcccgacataccgacaataagcatccaatcgcccggcgtaatcggcactgttttgaaaataggctgcagcggcggataatagatgacgatgaccatcaggaaaatagaagaaacgatggcgccgagcagatagatattttcaaacggattccgggaaaaaacagatgtttcgctccggcagtcaaacacgtgtataagctgagcgaggacaagagtcgcgaatgcgacggtctgtgcatacggcagattttcagggttgcggtgatagacgatgataaacgctaaaatggttgcggccccgatcaaaaaccctcttgagacgactttccagcccagttttctcgcaaataccccttctttcggatgccgcggcttccgcctcatcaggtcatcttccggctgatccataccgagcgccatcgccggcagcccgtcagtcactaagttcacccacaagatctgaatcggaacgagcggcagcggcagagcgagaagcatcgcaaacagcatgactaaaatttcaccgacgttggaggcgagcaaataccggacgaattttcttatattttcatagatatttctcccctcttttatggctgatttaattgtggcgaagttatcatctacaagaatgagagaggaggcttccttcgccacatccgttcccgtcacgcccatggcaacgccgatatcagcctgctttatggctggtgcgtcatttaccccgtcacccgtcatggcgacgacgtgtccgttttcctggaacgctttgacgatttttaatttatgttcaggtgacacacgggcgaatacgtagatatcatcgaccgtctcgataagctctttctccgaaagcttattcagcgtcttgccgtccatcacacgtccttttttcggaagaagccgcaaatcttttgcaattgcctttgccgtttcgacgtgatcacctgtaatcattaccgttttaatgcctgcttcacggcattctttaatggcctgtctgacctccggacgcggcggatcaatcatgcctgacaaaccgagcatcgtcagatttttttccgcctgctccattgtcggcttttcgccggacttaagcggtttataagcaatcgcgatcgtccggagggcttgcgatgccagctctttcaggatcgtttctgtttctgttttcatttctcctgaaaaaggcgcgcttctgccgccgtgcatcatatgtgacgaacggtcaatcagcacatcgggcgctcctttggtaatgacgaactgctttttttctttatcttctacgatgacggtcatcattttgcggacggagtcaaacggaaactcggcaaccacccggtattgttcactgagccagtcgtttgaatagccgccttttctcgcagccgtcagcagcgcaccttctgtcggatcgccgtcaagcacataatgaccgtctttcagttcaatttctgacgtattgcataatgcgccaaaaaccagcatctgttcaagaatcttctcatctttcggcttgatttcccgctcatcacacgtgaactcacccgctggctcatagccgatgcctgacactttaaatgtttttccgcctgaccacatatgggtgacggtcattttgttttgtgtcagcgtgccggttttgtcagaacaaatgacagaggcgcagcccaatgtttcaactgccgggagctttctgacaattgatttttgtttaatcatgcgctggacgccgattgataaagccaccgtgacaatagcgggaagcccttccggaatcgcagcgaccgccaatgacaccccggccaaaaacatactgtaaagctcatgtccctgtaagacgccgaccgcaacgaccaataccgtcaaaagcagcgcgatgatgattaaaattttgccgagctcttcaagtcttcgctgcagcggtgttgaaaggttgcctgcggattccagcatatcggcgattttccccattgccgtattcattcctgtaccgacgacgacgccgacaccgctgccgcgcgtcacgatcgtacccataaacgccatattattaatatcgcctaaagaaacatccggttttctcagcttatcagcttgtttgacaaccggaattgattccccggtcagcgccgattcttcaatttcaaggctcttcgcttcaacgatcctcacatccgcgccaatccggtcgccgcttgtaaatttcacgatatcgccgggaacgagctccttggactgaattttcttccagctcccgtcccgtaatgctgacacatacggcgttgacaattcttttaatgcatgtaaagatttttccgcccgcctctcttggaaaaaaccgagcaccccattgacaaatacaatcgccataatagctatggcatctacatattcgcctaaaaacccggaaattaaggttgccaccaacagcacgagcaccataaaatccttaaattgggcgaaaaacacgacgatcgccggtgtcctcttgccctcctgaagctcgttcggtccgtgcttttcaaggcgttttttcacctctttttcggtcaatccctgtttaatggacgtatttgttgctttcagtaaatcggtttgtcccatttcatgaaacttcattcttctcgtccactccccctgctcgctttagagatgtcactctacaaacaagcttattctgactcgtcccttttcatgctataattatcgaatgcaggaagaaggaaagggtgttttatatgtcttttgatggcatgtttacatacggaatgacacatgaattaaacagccggatcgccggaggccggattacgagagtccatcagccttttaagcacgatgtgatattccatatccgcgctaacggaaaaaaccataaattattattatcggcgcatccgagctattcacgggtgcacatgacgaatcaggcctatgagaatccgagcgagcccccgatgttttgtatgctgctcagaaagcatatagaaggcggatttattgagaaaatagaacaggccggattagaccggattatgatattccgcataaaaagcagaaatgaaatcggcgacgagaccgtaagaacgctgtatgttgaaattatgggacggcacagcaatattattctgactgacggagaaggagccatcatcgacgggctgaagcatttatctccatcgatgaacagctaccggaccgttctgccgggctatgattacaagctccctcccgctcaggaaaaaatttcaccgctggccgcggacgaagaggacattttgcgttatctcagttttcaggaaggacggcttgaccagcagattgtcagacatttctccggggtttctccgctgtttgcaaaagaagccgttcacagagcgggcctcgcgaacaaaataacgctgccaaagacgctgacagacatgttccatgccgtgaaggattgcaggtttacaccgaacattacgacagcagccggaaaggaatacttttatcttctgtctctcacgcatgtaaatggagaggagcgcacctttcactcactgagtgagctgttagaccggttttatttcggcaaagcggagcgcgaccgcgtcaaacagcaggctcaagatctcgagcggtttgtcgcaaatgaacggaaaaagaacgccaataagattaaaaagctggaaaagacgctggactactcagagaacgcgaaagaatttcagttatacggcgagctgctgacggcgaatttgtatatgctgaaaaaaggtgacaaagaagcgaatgtcatcaattattatgatgaagagagtccgacggtggccatccctttaaatccgaacaaaacaccgtcagaaaacgcgcagatgtattttacaaagtatcaaaaagcgaaaaattccgttgaggttgtaaaagaacagatccgtctggccgaggaggaaatcgcttatttcgaccagctgattcagcagctttcctccgcttccacaaaggatattcacgaaataagggaggagcttgttgaaggcaaatatctgcgtccgaaacagcagagaggacagaaaaaacagaaacagcacgttcctgttttggagcagtatgaatcttcacagggattgacgatcctggtcggcaaaaacaataaacaaaatgagtatttaacgacaaaagccgccgcaagggatgatgtatggttccacacgaaagacataccgggatcccacgttgtgattaaaagcagcgatcccgatgaacaatccatattggaagcagctgcgatcgccgcttatttttccaaggcgaaagattccggctccgtgcctgttgattatacaaaaatcagacatgtgaaaaagccaaacggcgcaaaacccggatttgtcacctatgacagccagcataccgtatttgtcacacctgatgccgaccttgtcatacggctgaaaaaataaacgcacctccaagctgatacccgcactcagcttggaggtgtttttttattaccttatttctgaacataaatggagacggaccctccgtttacatgaaactctccccagccgtcagatccgatttttacagtatctgaacggttgcccgttatgtcataccatgtctcgccggcatttttcaggccggcatacatccgctttgatccgccgggtccgtccgtgattaaagcggccaaacctgatttggcggcggagctgtcaccttccctcgtccatccgatcacatccgggtggtcaatataatcgtgctggggcccgtatgcgtactccttacgcgcttttaaaatcggctctatcttatctttcagtgagggaatttcctttggcgatgtcccttttgtcccgtacatatccccatagaacacctgaggataaccggattctcttgtcaaaataaaggcgtatgcaagcggtttaaaccaagtttggactgtcgattccaatgactgtcccggctgtgtgtcatgattttcaacaaatgtaaccgccttttccggatgctcggacacaacggtaccgtccagcaaacgcctcatatcatatccgcctccttgtgaggaagccgcctgtaaattgaaatgaagcggaacatcaaacacggattgattaaagcttgttttattcaagtagttttcgagtttcccggcattattctgccaatactccgcaaccgtaaacatttcttttcccgtcgcctgtctgaccgcctgaacccaatcacgcagaaatgaaaatttaatatgtttggcggcatcaatacggaagccgtctaatgacagttcattcgcataccagataccccatttttttgtctctgccacgacatcagggtggtcgtagtcaacatcagcatacattaaatagtcatagttgccgttttcacttgatacttcccaatcccacgcttttccttccccacgaaacttaaagatgcggctgatcttccgggattcatcccagtccgctccgtcgaaatgataccaatgccatttaaaatcactgtacgtgtttccacggcccggaaaacgaaaatccgtccacgctttgatttgatattcccccgaagtttcctgatttctattggccggattgacttcgacggcagttacatcttctgttgcatcagcaccagccttatgattcaaaaccacatctccgtatacttggacgttccgggaatgcagtgagccgatcgcatcttgaagctctgattttgtgccgtatttcgttctgaccgtccctttttgctggaattctcctaaatcatacaaatcataaggtccgtatccgttatcggattggctcgttcctttgtatgcgggaggaatccagacggcagtgattccgatatccgataaatgttccgcatcattctgcaatcgtttccaatgctggccgtcgttcggcgtataccattcaaaatactgcatcagcgtgccatttacggctgatgtttttgtaatcggcaaactgacaaataacagcgtgcacataagcacaagtctgaacgaaactgtccgctttcgtttttgaatcatgtttcctctccctctcattttcttatacaaattatattttacatatcagtaaaataataacaacccccctttattcctattttttacacagcggacagtctggacagcataaaaaataccctgtctgatgacagacaaggtatttttatggtcttcttcttttctcaaacaatcgatccacttcttcagccaaatcatcagtcatcaaaggctcaatgttttcagccagtcttttcgtatgtgcggggcttgccccgcttgttgatactgatacttgaatgcgccctttgcggatgatcttcggcatatatacgctgccttgttcagccttgcttacacagttgaccagctgcgtttcagaagcgtttgcggctatctcctgattcacgcctcggtcatttgtcgcggcaataatgaaaaaagcgggcttgagatctttcatttcaattctccggggaatccagcggatgcgtccttcatccgccagctttttaatttcaggcagggcctcaggactgatcacggtaatatcagcgccttccggaagcaccgttttcagccttcttaatgcaacattgcccccgccagcaatgatgattctttttccgctgagattaatgtgaagaggcagcatactgtccccccttaaaatcaaaccgcccgccggggtttcgaacagcttctgtcacacggttcaaaaacgcctgcttaatatgcgggtgaaaacctaagtatgaagcgagatgcacattccgattgaccgcttgaagcttttggacttcccgttcaatctcagtcatcaaaagcccggtaaacaaaagatacgggacgataaaaacgggtgctccgtcatcgactctaaggctggtaaacacttctttatagtgcggatcacaggctgttaaaaaacaaggaatgacttctttaacagatgtgatcgcctcaagttttccggcaatctcactgacggcatgtttaaccgccggatctctgcttcctcttccgatcagcaccactttcgcctgctcaatcggcactccggtatcctcaatgcgatgatggaccgcttttacgacttcatcatccactccgatcggaacgccgtatgtcacttttatatcgggattccgggccgctgcgcgggcgatttcagccgggatatcatgttttgcgtgggcagcggtcaacaagagcaaaggcactgcggcaatatgagtggcgccttgtttgacacatgcttcaaatcccgcttcaatagacggttcctgcagttctaaaaaacagatttcctgaatgggagcgtctgcgtgcggcctgcacccttttaaaaatgccgccgactctgtctgcgcttctttcagccggcttccgtgcccgatgtataaaatcgcctgcttcatttacaacgcctcgctcagatccagatttttcagttcagattcaaaccagtccagcttacagtgataattgacgacatcaccgatgacaattaagctcgggtttttgatctcttcttttatcactgtgtctgaaagtgtgctgacggtgcagacgactgttttttgcctgtccgtcgtcccccagtgaataaaggctgccggggtgccgccgtctctgccgttttccagcagcattctttcaatctgccggatatttttaattcccatataaatcaccagcgtatcaatgcccgtcgccagcgctttccatttttcttcaaagtcgtcttcttgtttataatgtcctgtaacgaaagcgacattggagctcgcctccctgtgcgtcactggtatgccggcgtaagcagctgccgcaattcctgatgtaatgccgggaacgatctcaaacggaatggcgttttgcgcgagagcctccgcttcttcgcccccgcggccgaaaacaaacgggtcgccccccttgagccttacaacggtttttccctttttcgcatacttcacgagcaaacggttgatcgtatcctgcttcattatgtgaaaatccgggagcttgccgcagtaaatcaggtccgctccttctcttgcatactgtaaaatctctttgtttaccaatctgtcatataaaataacgtccgctttctgtatggctttcattgccttcaccgttaataagtccggatctcccggaccggctccaacgataaatactttccccatagcatgtctccccgatccgttttgacatcttctcagaacagccgcgaggccgcacttcagctattttaccatatcccgccattcgcggggatatccggctgattgcgcggcctttttggacttattatgctaagctgtttttcacaaaatcaatcagtctgccggtgcattcctcacgttcatatttgcctgaatcaagtaccagctcaggcgctttcggctcttcatacggtgagtcgatccccgtaaagaacgggatttcaccgtttcttgcttttttatataaacctttcggatcgcgcttttcacatatatcgaggtcgcatttcacgtaaatttcattaaattcgccttctgccacgagctctctcacctgatctctgtcctcacggaacggagaaataaaggctgtaatgacaatggtgccctgctgaacgaaaagctttgccacttccccgattcggcgtatattttccttgcggtcatcatcagaaaagcctaagtccttgtttaaaccgtggcggatgttatcgccatcaagcacaatgacctgatagccttgttcaaacagttcgcgcgctgctgcgtttgcaatcgtggatttccctgagccgctcaaacccgtcagccagaggatagagcttttatgcttatttttctgctggtattcttctttcgttattgaagcttcatgccatacgatatcacgatttgtcactcttttttcctccttaagaaacgcctgcttcttctttcgttttcatccctttaattaacacctcgacaacttcgggacggctgaattccgccggcggcatgacgccgcttctcagcatttctctgacctttgttcctgacagaatgacgtggtcttctctgtcatgcggacatgttttggccgttcccatgttgccgcatttttggcagaagaagctgtgctcgaatttcatcggtgtaatcccgagctcctccgctgtaaattgatcaaacagctcttgcgcttcatatgtgccgtagtaatcaccgacgccggcgtgatcgcggccgacgataaaatgcgtacagccgtagtttttgcggacaagcgcgtggaaaatggcttctctcggtcccgcataccgcatggccgccaaaaatacgccgaggaaaacgcggtctttcggataataatgatcgagcagcacctggtagctttccattctgacatccgccggaatgtcatctgattttgtttcaccgacgagcgggttcaaaaacaagccgtcaaccgtctcaagagcggttttctggatatattcgtgagcgcggtgaaccggatttctcgtttggaaaccgacgatggttttccagcctttttcttcgaagcttcgtctcgtttcagcaggttcaaacgtaaactccggaaactgctttgacgcttttttaattaatgtgatcggcccgccgacatacgtatcgccgcgtgaaaatagttttttcacgccggggtgcgcggcatcattggttttatatacgtgaacggcttctttttgtttatccggcgtataaatatcttcgatgtccacgacgccgtatgtttctccgccgtaagtcagtttcacggtgtctccgacggcaagctcagccgctttttccgaatcgaccggaagcgtgatcggcaaagaccagacggcaccggatgccaatcgcatattttctacgactgacacgtaatctttttctgtgaaaaatccttcaatcgggctgtagcccccgattccgatcagttctaaatcagcgaacgaaatcaaatcaagctcaatttctttttgaacggatgtaagatcatactgctcattcacccgattaattaatgtgcctccgtgcggtgctaaactcataattcattattcctcccagttaacagataaataaactcagattaatagttagatgcccccgccttgttcatggacagagcgtttctcttttcggatggctttcatcagactggcggctccgccaaatgccaaaagcacgctggccatcataaagatggaatagtaatctccttttaacagcagtgagacaagcagatacgaaatcgacagtgacaagaacggggaaacgacccatactttgagcatcgtttttacgacttctttatgaaaaacgttcggcccgtttttggccattccgataccgataattgatgatgatgtcacctgcgccaaagggacaggcagaccgaagacggaactgataatgacaagccccgcgccggttccggaaagcaggatgccttcgccggctgaaaatctcgtaatcttttttccgttggtttcaagcactttgcgtcctaatagcagagcgccgagagcgacaaatacgcctccgtacagcgtccctttggacacgctgagcacgccggccgcaaccaacgggcctaccgcatttgcgacgttgttcattccggctgaaaaagcttcccaaaaccccgcaacaagcagcacaatccccaaaatcttctgtttccgattcgaaacgacccgaatattcagataactgaataccttcgatacgagaaacgtgaaacagaatgcgacaaacggaacaagcacccaaaagatcacgatcaccagaagatgctgtaaaaacaacactttgtatgcgacgccgacaccgacaatcgctccgacagtgacctcactcgtcgacagcggaatgccgagcacattcgccgtgaataacgatagcgccgccgccccgataataatgcagacgatggtgagcgtaattgtctgttcgggaatgattccgccgctgatcgtcttaacgacttctccgccgccgataaccgcccctgacaggacgccggctgcgcagatgatcagcgcatacgttttctttttaacggcgcctgacccgtaagcgactcccattgaagctgcggctccgctggctccgatattcatggcaaaaaacaggctgaataaaatagcggctaattccatcttgcagctcctttattcatgcagtccgcattctgttttcgccatgccgttccatctgccgctgcgcaaatcttctgcggtaaacgcaggtgaagtgcacggttcacagccgatgctcggatagccctgatcatgaaggatattgtaatccagctcatgcttggatgtatatctccagatgtctttccatgtccaatggatcagcgggcagactttaattgattgaaacttgtcgtctttattcaggaaattcgtattcgcccggctcggcccttgatcgcggcgaaggcctgacagccatgccggacgcccggcgagcgcttctcttaacggcagaatttttctgatgaagcagcactggttcggttctctttcccatagtttatccccgtgagcctcggcctgttcctcaagcgtaaggccgggctgtttcaggatgatgttaagtcccggataacgttctttcactttttcgatcgtttcataggtttctttaaagtgaaggcccgtatcgagaaacacgatttccgcgtcttttttcactttagaaatcaaatcgatcaggacgatgccctcaatcccgaagctgcacgcgtaaacaagctggtctccgtagtggccgtacgcccattttaaaacggatagcgcgcctttataggaatcgtcttccggaaatgtaatcgccggttcttcccatgtgtcatacgttagcattttttctttcctcctcccggagacaatcaaacagctgttgttttctgccggttgtcttatccctcaatctttttttcataaaaaaactttcaatccagcggaatgaaagacagtgacccgatatagcccttatcttcaaaatgctgtgcatttttctggatgcggcaccttgcaatacatgcaggttgccgggcgtcatcggtccagtccctcagccgctcttgataagctttttagatttgtactaaattttagcacaattctaacagaagtcaacccgagttttttgataggaataataaaaacaggccctgaggcctgtttttattattattattttttaaaccaatcttttgactcgggattctgtttccatgatttcagtttctcaacgtcatctgaatgaatcgttccgttttctagcgccacttcaatcagcgtgtcataatccgttaatgagtaatacggcagacccgcttttttaaaggcttctcttgctttcggcagtccgtatgtaaaaatggagatgacgccgaggacttccgcaccctctttttgaagggccgccgcagcttcgagcacgctgcctccggtagaaatcaagtcttcaatcacgactgttttttgcccttttttaacggcgccttctatttgatttcctttgccgtgcgctttcggcttgcttctgacgtagcacatcggcgcgccagtacggtctgcgagaagcgcagcgtgcggaatgcctgccgttgcagttccggcgatcatctccgcttcggggaaatgctctttcagcagtttgctgagcccgtccgccacgtcatttctcacttccggatacgacaatgtcagacggttgtcacaatagatcggtgataaaatgccgctcgcccaagtaaatggctcattcggacgtaaaaagacagcttcaatgtgtaatagatgttttgcgatagcttgtttcatcggcgaacaccctcccattccagtttaattgcttcatatgctttaacgggattttccgcttttgtaattgagcggcccacgacaatggctgacgagccgttttctttcgcaaatgacggagtcgccgtccggacttgatcgtcagatgcgtcactagcggtgcggatgccgggcgtgactgtcagaaatgacggccggaccgcttcataaatggcttttgtttcatgaaccgaacataccactccgtccagcccgcactcttccgccatttttccgtaatgaacaaccgtttctaaaagcggcttttgcagcagaagctcttccttcgccatctgctctgaagtgctggtcagctgggtgactgcaattaaagacgggcgttttttgcctctcggcgtgccctcttcaagcccttctagagccgcgcgcatcatccgtgcgcctcccgctgcatggacattgacgagatcaacgccgaggccggcaagccgtttcatcgctttattgactgtagtcggaatatcgtgaagcttcaaatctaaaaatatgtcacaattccgttcttttaattggtgaatgatggccgggccttcctgataaaaaagttccatccccgttttgacaaacagcctttccttttcaaacaaatctaaaaacgctaaagtctcttcccctgatgcaaaatcaagcgcgatgatgggcaggttgtttttcatgcttccagctccttccgatgcattcacttacagattgaaagccgtattggcgcagcacacgagggagctgttctatgatttccgggcagacaaacggattgacgaagtttgccgtgccgactgcaacagcactcgccccggcaagaagaaattccagtgcatcctccgcggtctggacgccgcccatcccgataatcggaatttgaacggcctggctgacttcgtataccatccggatggcgaccggtttgattgccgggcctgacagtccgcccgttttatttgctaaaatcggccgtcctgtcttaagatcgagcctcatcccgacgagtgtattaatcatcgtcaggccgtcagcaccggctgcttcaatcgccttggcaatttcggttatgttggcgacattaggcgaaagcttcacatatacaggcactgcggaaacttctttcaccgcttttgtcagatcggccgccatggcgggatcagtgccaaaagcaatcccgcccgttttgacattcggacacgaaatgttaagttcaagcgcatgcacattcggcgctttgctgatgtgctcggccacttctttatagtcttccacctgagaaccggcgacgtttgcgataatcggcgtgtcaaactgttcaagccaaggcagctcatgtttgagtacatgctcaagtccgggattttgcaggccgatggcattcagcattcccgcgcttgtctccgccactctcggtgtcggatttccgaaacgcgcttcgttcgtagtggctttaatcatgatgcctccgaggcatgataaatcataaaatccggcatattcctttccgaaaccgaaacatccggaagcggggatgatcgggtttttcaatcggagacccggcaaattcacctctaacattacagcgccacctcctcagctttaaataccggcccgtcaaggcagactttcacatatgatgtatcgctttcgcccgtacggcacacgcaggcgaagcaggcccctatgccgcagcccatccgctcctccatcgagagataaacctctttatggccgtactgctgcttcagtgctttcagcatcggtgtcggaccgcagctgagcaggacatcgaattcgagctgcttttcgcggatgatgtcagtgacaaatcctttttctccatatgtcccgtcagccgttgccacataggtgtctccgtacgcgagacattcctgttcataaaaaacatcctttgctgattgaaacccaagcacgtgaatgacgtttacgcctttttccgtcaggcgctttgacagttcctgcaaaggcggaaccccgactccgcctccgactaacagcgcggttttgccgggttcaatccgccggacggggaatccgttgccgagagggccgagaacgtcaatcatgctgccctcttttttctcggacaaaagacgcgttccctcaccgtcagttctgtagataacggatacttcattcacggcgaaatcgacgtccgcaatgctgagcggccttcttaaaagcggcgtgaccgcgtcactcacctttaaatgaagaaattgtcccggctcggtaaagtgccggacaagttctcctttcagcaccatcttatagatctggtcggcaatttccgaattggattgaacagtcaaatgcgcttttttcatatcgtgacagccgccttttgattggtttcagatgcaggcatatgatccgcacagaaagtcatgctttccaatacccgcaaaatggcttcggccgtatctaaagatgtcaggcaggcgactccgttctcaacggattcgcggcggattctgaagccgtctctggccggctgtttgccttttgtcagcgtattgatgacaaattgcgcttcaccgtttctgatgacgtcgatgagattttttccttcttcgccgattttcccgacgacctgagccggaatccgggcgtctttcaaataagccgccgttccttccgtcgccaagatgttatagccgattgcgtggaaccgcttcgcgatcataagtccttcttctttatctttatcggcaacggtcaatagcactgagccgtaattcgggatttgaatgccagaggcaatcagcgctttgtagagcgctttttccagggttgaatctttgcccatgacctctcccgtcgatttcatttcaggccctaatgtaatatccactcttctcagcttcgcgaatgagaagacaggcgctttcacgaataccccctgctgttcaggctgcagcccttctttgtagccgaaatcagcaagcttttggccgagaatgacctttgtcgccagattcgccatcggaatctttgtgattttgcttaagaacggcacggttctgcttgaccgcggatttacttcgagcacgtacacttcaccttgcgacagtacgaactggatgttcagcaagccgatgatgttgagtccttttgccaaagctacagtgtattgttcgatttttttcttaatgtcttcgcttaaagactgaggcggatagacggcaattgaatctcctgaatggacgccggcccgctcgatatgctccataattcccgggatgacgactgtttcgccgtcagatacggcatcgacttcgatttcttttcccgtcagataacggtcgattaacaccggatgctgcgggttgattttgaccgcgtttttcatatagtgaagcagctcttcttcatgatagacgatttccatcgcccggccgccgagcacgtatgaagggcggacaagaaccggatagccgatggatgcggcaattttgaccgcttcgctcaccgatacagcggtttttccgagcggctgcggcacattcagcgcctcaagcgcctgctcaaacttatccctgtcttccgcacggtctaaatcctcaagtgatgtgccgaggattttgacgccgcgggcgcttaattcttccgcaaggttgatcgccgtctggccgccgaattggacgacaactccttccggctgttccaaatcgatgatgtgcatgacatcttcaaccgtcagcggttcaaaatacagcttgtctgatatgctgaaatcagtggacaccgtctcagggttgttgttgataataatcgcttcatagcctgcctgcttgatcgcccagacagaatgaacggtcgcatagtcaaattcgacgccctgtccgatgcggatcggacctgagcctaggacgacgacactttttcttggtgtaacctcagactcattttcttcctcatatgtgctgtagaagtacggagtttctgattcgaattccgccgcgcatgtgtccaccattttatatacaggcttgatggctgcttcttttcgcatttgatacagctcttgttccggcatgttccattcccggctgatatatttgtcggaaaagccgagttccttcgctgtctgaaggacggcgaggctgcctttttccgctttcagctttgtttcaaaggcgaccagcttatagagcttgtgcaaaaagaaaacgtcaattgcggaaaactcatgaagctgctctaccgtgtagcctcttctgaaagcttcagcgaggtaaaacagccgttcgtctccggcctttctgatccgtttttccaaaagcccgtcagaaatctcttccgcatccttcagttcgagatgatagacatcggcttccagtgagcggactgcctttaacagtgattcttcaagggtgcgtccgatggccatgacctctccggtcgctttcatttgtgttccgagtctgcggtttgccgattcaaatttatcaaacggccagcgcgggatcttagaaacgacatagtcaagcgcgggctcaaaagccgcatatgtttttcccgttacggggttcatcatttcatcaagagaaagcccgactgcgattttcgccgcaagttttgcgatcgggtaacccgttgcttttgaagcgagggcagatgagcggctcacccgcggattcacttcgataatgtagtattggaagctgtcgggatccagcgcgagctgaacattacagccgccttctatgccgagtgcgcggatcagctttaatgaaacattgcgcaaaagctgatattccctgtcgctcaacgtctgactcggagcaacgacgatgctgtcgcccgtatggatgccgaccggatcgatattttccatgttacagacgacgatcgcatgatctctgctgtctctcatgacttcatattcgatctctttgtaaccggcgatgcttttttccaaaaggcattgatgaacggggcttagttttaatccgttttcgacgatctccttcaattccgcttcatttgagcagatgccgccgcccgttccgcctaatgtgtaagcggggcggacgataaccggaaacccgatccggctgacaaattcctcggcttcctgcaaagtgcggataatctcactttcgggcaccggttcattcagctcattcatcagcgtacggaacaagtcgcgatcttccgcctgctggatggctgacagctttgtgccgagcacttccactccgcattctgcaagaactccgagatcagacagctcgaccgcaagattcagccctgtctgtcctcccaaagtcggcaggatggcgtccggccgttcttttctgataatacgcgtgagaaattccggcgtcagcggttcgatatatacccggtcggccatttccgtatccgtcataatcgttgccggatttgaattgacgagaatgacttcataaccttcttcttttaaagccagacacgcttgtgtgcccgcataatcaaattccgccgcctgtccgataataatcgggcctgatccgatcactaatatctttttaatgtctacgcgttttggcatgccgcttccccttctttctcagttgtttcgatcaagtcgatgaatctgtcaaataaatgattggcatcttccggccccggtgaagcttcagggtggtactgaacggtaaatgccggcaatgttttatgtttgagtccttcgatcgtttgatcattgatcgcaatatgtgtcacttcaagctctgtttcgtctatagaagagactgtatatccgtggttttgggcggttaaagcgactttcccggtcgcaagctctttaaccggatggttggagcccctgtgtccgaatttcattttttccgtatccgctcctgatgccagtgcaaataattggtggccgaggcagattccgaataacggcaccttcccgagtatgccttttatcatctcaatggcttccggcacatctttcggatctccgggtccgttagaaagcataatgccgtcaggcttcagctggagcacttcttccgccgttacattgtacggcacaacgatgacatcacattttcgtttgtttaattctcttaagatgccatgcttcatgccgaaatcaacgagtacgatgcgttttccgcggcccggactcggatatgccgttttcgctgatacttgagcgacttgatttctcggaagttccgtttctttcagaagtgcaagaaccgcttcgacattctcctcacatgatgcaaacgttccttttaatgcacctgccgtgcggatcattcttgtaagctttctcgtgtcaatcccttgtaagccggggatatttttcatcttcaaatactcatcaagcgtgtaagccgatctccagttggatggcagctcgcacaattcttttacgatcagcccttttacaaaaggagtaatggattcaaagtcatctctgttaatcccgtagttgccgatcagaggatacgtcagcgtcacgatctgcccgcagtaggaagggtctgataaaatttcctgataaccggtcattcccgtattgaatacgacttcaccggcggtatgctcaaggctcccgaatgcttccccctcaaataccgctccattttccagcactagtcttcttttcatttgacgagtctcccttcttcgtatgcaagcttcccgccagccatcgttgcgacaggccagccgaagcacttcatcttgttgaatggcgtattttttcctttagataaaaatgtatctttgtcaattgccgcttctttttccaggtcgatcagggtaatgtcagccggcgcgcccggtgcaagcgttccgtacggaagaccgaacgcctcgcaaggttttttcgtcatgaagtcaaccagctgcttcagcgtccacgatccgcttttcacaaagtgtgtgtacagaagcgggaaggctgtttctaaaccgacgataccgaaaggcgcaagcttcatgtccgtgtttttctcttcttcggtatgcggcgcatggtcagtggcgatgaaatcaatcgtgccttccaatagcccttcaatcagtgccgctctgtcctctttgctgcgaagcggcggattcattttaaaattggtatcaagccctgggatatcttcgtcacaaagcagcagatggtgcggcgacacttcggctgtcacgcgaattcccgctttttttgcgtctcttacggctctgacggattctttcgtgctgatatgacacacatggtaatggcagcccgccgcttccgccagcagcacgtcacgagcgatatgtaccgcttcacaaatggaaggtatgccattcaggccgttcgcttttgaaaaagcaccttcatgtacgcttccgccgtaaatcagtgagttatcctcacaatgagcgacaatcgctttattcattgaagccgcccgtttcattgcttcatacatcattccggcagtctgaacgccgacgccgtcatcggtgaaagcaaatgcgccggcttcatgaagcacctcaaaatctgtcatttgttcgccggtttgtctgatcgtgatcgaagcgtaaggaagaacccggacagatgaggtttctttgatccggttttgcagccattccatctgctccttcgtatccggcacgggccttgtattcggcatggcggcgacagtggtaaaaccgccccgcgccgcagctttagagcccgtttcaatcgtttcttttttctcaccgcccggttctctgaagtgtacatgaaggtctacgagccccggtgagacgaacagaccggaagcgtcgatcacggtttccccgtcttttgccgtcagtatgccggtttccgcaatgatttctcctgttacccggatatcctgcgccactttttctccctgttcatttaacatccagccgtttttaatgagataagacataagccgcttctccccttttcgcattggtttgcagtgctctttttaagactgccattctgatatacacaccattttccatttgtttaaatattcgtgattttccggattccactaatattgtgtcaatttcgacccctctgtttaccggtgcgggatgcatgatgatggcatgccgcttcatgctttccgcacgctttgcggtcagcccgtatgcttccaggtagcctttttggtccgcttctgtctgatgtctttcattttgaatgcggagcagcatgacgacatctgaagcttgtatggcttcatccgtctgaacacaggtgccgaaggagttgttctcatcctgccattgcggcggaccagaaaacagcacgcgtgcgccgagccttgtcagcacctcggcatttgaccttgccaccctgctgtgtttgatatcgccatgaatggaaacggtcagaccctgaaaattctcaaattcctcttgaatcgtcattagatcgagcaatgattgggtcggatgctggccgcagccgtcgcccgcatttaagatcggaatatttactttgccagtcagatccttgtaatattcatccgtgctgtgcctgatgacgcaggcgtccgctccgattgcttccagtgttttgatcgtgtcgtataaagactcgcctttttgaacgcttgtactcgtgccgtctaaattgagcacgttcataccgagctttttttccgccacttcaaagctgaaccgcgttctcgtgcttggttcaaaaaacagattcgcaacgaattttcccgagagatcggggcactctgttccctcttttatcgcttttgcctcacgcagcaattctgtaatttcagccgtgctcagttcagacatcgccgttaaatgattcatgtttttttctcctccgtttccgattgaaggccgtaaaaaaacaccccggcctacagactcggggtgcggttaaagagagaagcagcgtacagcttcttcccgttataacccttccaagcctctctggactttctttaaaaggtttacatatgattttgttgttctgctgcgtccgcgtcttcatcatttgtgtgcggcaggataaggttcaggatgactcccacgattgccgcaagcgccatgccggatatttgaaacccgccttttgatacttgaatgaaagcaccgccgacgccgatcacgaggatgacggatgtgataattaaatttctcttgttttcataatcaatgttgttgtcaatcagcattctcaagccgctggaggcgatgattccgaagagcaggaaggaaacgccgcccataactgcggacggaacagagctgatcagcgctgaaactttgccgataaatccgaagcacagcgcaatcacacccgcgccgccgatgacaaagacgctgaaaacccttgtaattgccagtacaccgatgttttcgccgtacgttgtcgtcggcgggccgccgattaacgaagcgatgatcgtcgcaacactgtcccccattatggagcggtgcagccccggctttttaatgaaatcctgtccgacaactttactcagcaccatttgatggccgatatgctctgacatcgtcacgaaagcgaccggcaccatcgcagccgcaatgcccaatgtcactgacggcgtatagtctttgaaaggtatgataaattcaggaacggcgaaccattttgcatcaatgaccggctggaaattgacgattccctgtgtcagcgcaaacagatagccgcctataatgccgatcaataccgggatcaggcttaaaaatccccgtaaaaagatggcgcagataatggtgattgccaaggtgacaccggctacactgaaatgcctcagactgtagacgagttctttcgcattcggatcggcatacattgccatattgacggctgtgcttgccagtccgagtccgatgacgatgatgaccggccctacgaccaccggcggcagcagcttcatcagccaccccgttccaagctgcctgataaggagcgcgatcagcccgtacacaattcccgccaggaaagcgccgaccatggcagcccccggtccccccgtcgctttcaccaagataatcggtgagataaaagcgaatgatgagccgagataagcgggaatccggccttttgtcaccaagaggtaagcgagtgttccgattccgcttgtgacaagcgcgactgccgggctcatcccgaccagtttcggcacgagaatggttgagccgaacatggcgaataaatgctgcaggctgaatgacagccaagacaatggattggggacgtccctgactcccaggtttacttttttcttactcatggcgtgtttcctcccggttgactttcaaatggtataaaaaaacctctttgcttttattgcaaagaggcatacaaaacccggccgcgtcgatccgcccggctttgtgttttaaaatcctcttcgcaaactctctggaatgcatttaaaaagggtgattattcattttcgtaaatggcgaccatatcagtctgatcaacttcgctcagctgaaccatcactttttcagcttttgaggtcggaatgtttttcccgatatagtccgctctgatcggcagctcccggtgccctctgtcgacaagcacggcaagctgtatcgatgacggccgcccgacatcaacgagtgcatccatcgccgctctcaccgtccggccggtataaagcacatcatcaaccacaatgaccttttgatctgtaatatcggccggaatgtccgcaccttttacaagcggttcttcattgctcgtttttttcgtcagatcgtcacggtaaagggtaatatcgatttctcccacggtgaccggattcccttcaatctgctcaatccgttcggccagccgctttgctaaataaatgcctcttgttttaatccctacaagaatgcagtcattcattcctttattccgttcaatcatttcatgggctatccttgtcagcgcccgtctgatggcctgttcgtcgagaataacagctttttgattcactcgtgacacctctccattcgtatataagaagaaaaaacccctcctgccagagcatagaggggttcctttccaggacgaagacacacacgtatctcttctgtcctatccgttatccttctcagcctctctggactgtgttaaagaatctattcagcttgtttttattatttcagaaaagaaactcgctgtcaatgactatttctcaaaagttcaatgagttttttcatatcttcaggaaggggcgcttcaaactccatgtattcgcccgtccgcggatgatcaaagcctaatattccggcatgcagcgcctggccgttgaaatcaaccgtttttctcggcccgtacttcggatcgcccgccaaaggaaatccgatatatttcatatggacgcggatctgatgcgttctcccagtctcaagacggcactctacgagcgtgaaatcttgaaaacgctcaagcacgtggaaatgcgtgacggcgtttttgctgccttctcttgttacggtcatgctttgacggtcttttttatcccttccgatcggagcgtcaatcgttccgtcatcgtgtgaaatcactccgtgaacaaccgctgtgtactttctggtcacggttttattgacgagctggttaacgagtgactcatgcgccatatcgtttttggcgaccattaacaggccggaagtatccttatcaatccggtggacgattcccgggcgcattacgccgttaataccggaaaggtcattgcagtgagccatcagcccgtttacaagcgtccctgtcacatggccgggcgccgggtgtacgaccatcccccgcggtttgttcacaaccaagacatcctggtcctcatagtaaatgtccaagtccatcggctctgcaagcacgtccagttcttccggttcaggaatggtgacgtttacctgatcgccgggctgcattttataattggctttgacggatttgccgttaacggataccaatccctcttttacccattgctgcacttgagtgcgtgaccagttttctcctgttgaagccaaaaatttatcaatccgttcgcttttttgttcaggctgaacggttatctcaaattgattcatgttattgctccttctttttcccgctgtcaaacagcatatgaataaataaaagtatcacaccgacgcacagtgatgaatccgcgatattaaaaatcggatattgataattcacgatgatgacatgaataaaatccaccacttcctggcgcgccgcccggtcaataaagtttccggccgcacctcccagcattaagccgagagaaatcccgagtaacatctgcccttttgcataacgctgtatgtaataaacgattccgataatcacggcgatggtaatgacgtagaaaaaccacatttgcccggctaaaatcccccatgccgctcccgtgttgcgatgagaagtgatataaagcacctgatcgatgacaggtatgctttgtcccaattccatatggctgacgacaagccatttggtcaattggtcggcaataataataaaaagagcgataagataataaagcacacacgttcctccagtatacagttacttttatcctttatgaattttatcagtaaaagatggcggagtaaaggcagatcataagcgcatgcagacagacgctgtcactcatacagcgcctgatcatatgcataatctccgggtacccagtatggaagggttttcttttcaaattgagcgggataataaaaatcatcagcggttctggccgtcggcaaaaccgcaagcttgtcaatcggaatgggggcgcctgttttttcacaataaccgtacgtattgttttcaaacttagacagggcaagaagaacgtcctgaagttcttcttttatatgatagatcagagttgcttcttggtcgttcattgaaggttcaacagatgctgacatgtgaaagcaagaatattcgaataatcttgattgaagttcttctttcatcatgagaagctccgtgtggattgcggtcagttgatcattcattcattcatcacaactcctgctcttgatgttatagctttattgttgccccggctgcgtcatttgaagcccataagatttttcctatcgttctaatcgatgacattgctggcatgtaaaaaagcgcccggctgaccgggcgctttctcattcattatttttgataatatttttcaacgatttccgcatttcgcagtgataatgtcggatacttcggattggctccgacatctttagaaatcacgcgggaccgctcacacatctggccttccgctttttctacggtcatttttcctgtcgtgaagctttgcgctgtttccggcgcttcactttcgtcttttactgtcagttctgagacgataaacagctgcgcgatattttctttaatggatgacaaaaggtcgcggttttctttgttcggatacaaagtcaggctcgcttccaatgatcttccgataattttctcgttacgggctgtttccaaagccttcagcacgtcgttgcgaagctccatgaagcggtcgaatttttcttctgtcgcttgactgtccggaacagagatggtttccggcatatctgtcagctgtacgctcgcttcttcaacaaatgataagtgagaccacatttcatccgctgtatgcgggagaatcggcgccgtcagcttcactaacgccagcagcgtttcataaaagacggtctgcatgctgcggcggtccggatgatccgcatgctcgatgtacacaacatcttttgcgaaatcaagatagaaagagctgagctcgatcgtgcagaaattgtgaatgctgtgataaacaaccgcaaattcgtattcatcgtacgcttttttcaccttatcgatcagcttattgagcttgatcagcatatattgatccacttcgcgaagatctttaacagcaacggcattgacacttggatcgaagtcaaacaggttgccgtgaaggaagcggaacgtgttgcggactttccggtatacttcagcgacctgcttcagaatgtcttcagaaaccgggtggtcggcctgatagtttacggaagatacccataaacgcagaatttctgctccaagctgttttgcgatttttgtcgggtcaatcgtattgccgagtgatttactcattttacggccgtttgcatcaagtgtaaatccgtggcttaatacgcctttatacggtgcttggccagtgactgcaacagcggttgaaagagatgagttaaaccagccgcggtattggtcagagccttcaaggtataaatcagccgggcggacgagatcatcacgttcttcaagaacggcctgatgagaagatcctgaatcaaaccatacatccataatgtcttgttctttcgtgaaaataccgttcgggcttcccggatgtgtaaacccttccggcaggaggtcttttgcctctctttcaaaccagacgtttgagccgtgttttttgaacagctcagaaacgtgttcaatcgtttcgtcagtgatgaccggctcaccgttttcagcataaaataccgggatcggaacgccccagacgcgctgtcttgaaatacaccagtcaccgcggtcgcgcaccatgttgtaaaggcgctgttcgccccactccggcacccacttcgtttgttggatggcatcaagcagatcggatctgaaatctttaattgatgcaaaccattgcgctgtcgctctgaagatggtcggtttttttgttctccagtcatgcggataggagtgtgtaataaactcgagcttcaagagcgcgccgttttcttcaagcttctccgtgatcggtttattggctttatcgtaaaacattccttcaaagcccggcgcttcgtcagtcatgttacctttttcatcaacagggcacagtacttctaagccgtacttttggccgacgataaagtcatcttccccgtggcccggagcagtatgaacacagcctgttccggcatcggttgtgacgtggtcaccaagcatgacgagtgaatctctgccgtacagtggatgttctgcagtgatgtattctaattctctgcctttatatgatgcgacaacttccggattttcaaatccgcatgcctgcgcgacgctttcgattaattcagccgccactacgtaacgcttgtctccaaccttgatgacattgtattcaaggtcaggatgaacggaaattccgaggttggcagggatcgtccacggcgtcgtcgtccagataataaagctttcaccgttttccagaacacctttgccgtctttcaccttaaatgcaacataaatagacgcggaacgtttgtcctgatattcaatttccgcttctgctaaggcagattcactggaaggcgaccagttgacaggcttcaggcctttataaatatagcctcttttcgccatttcgccgaaaacgcggatctgctgcgcttcaaattcaggctgaagggtcacatatgggttttcccaatcgcctctgacgccgagacgcttaaattgttcgcgctgtctttcgatctgctgccatgcatattcttcgcaaagcttgcggaaatcggctacggacatttctttccggtttacttttttgtttttcgtcagcgccgtttcaatcggcaggccgtgtgtatcccagccaggcacatacggtgcgttatagccgctcattgatttatagcggacgataaaatctttcaggattttgttcagggcatggcccatgtggatgtctccgtttgcataaggaggtccgtcatgcagtacgaatttcgggcggtctttcgtccgttcttgaacaagacggtaaatgtcctgctcctcccaatctttttgcatgtccggctcacggttcggaagatttccgcgcatcggaaaatctgttttcggcattaacagcgtatctttgtaatccattttcattcctccacaacatttttcagaaaataaaaaaagccctctcatcccataagggacgagaaagcttatctcgcggtaccacccttttagaaaaaacggtcagccgtcctttcctctcgaacatcgtaacgtgatggaacgtcctttcctactggcggttcagaaaggaaactaaagggctgatctgcatgcttccggccatcccgggctttcaccttccccggttcgctttatagcctgttttgagtcatgccggtccctttcaatcgtcttttcatctgaatttatgaacgtattatattcgaacgggccggagaatgtcaagaaaatcagaaaattattctttttcctcaaataccgcgtcgacttcgtattctaacagatgatcccaatcatcgtttttcagcaggtcgagctgcgcttcaatcagcatttggaaacgcgttctgaacactttagactgtttcttcagctcttcaatttccattgcgatttttcttgatttggaaagcgactcattgataatgcggtcggcatttttttcagcttcacggacgatcagcttcgcttctttctgcgagttgcgctttacgtcttctgccgcttcctgggctacgagaattgatttattcagcgtttcttcaatattggcaaagtggccgattttttcgtccagctcgttcactttcgcctcaagctccgtttttttacggagtgcaatttcgtaatcttttctgacctgcattaaaaattcatttacttcatcttcatcatatccgcgaaaaccttttgtaaacgttttgttatggatatcattcggcgttaatggcatattgccacctccatttttacatttcagtacggttatctagttcacattataaaacaaatacggcacagatggagaaaaaaactgaaaaaacgacttatttttgccgttcaaacgtaactttccatttgtcttttttcgtttttccgtcaacttttgtcaaactgcatcgtccgaagccccgaatcgaaagcatgtccccttcagcaacctgataggaaggatcctcaacggctttccaattcaccttaacgagcccgtttttcacaagcgcctgcgctttctgccgggattgcctgctcattaaagcgcagacggcgtcaaggcgtaatgaagaaaccgtgtcttcccttatttcgacatctgaagcgggaatgtgaagtgcggaaagctcgattttctcaagctttaccggcgctttgcccgctttggtcagctgggtgccgacaaaatcggcgatttcacctgagacgataagctgcacggcttcctctgagaaaatcagatcaccgtatttctgccgctttaagccgattcccattaatgacccgagaagagagcggtggtcgatgctgacgaatttttcagcgtattgaacttcaaaagcccggagctcaaaatcatcctgttcaggttccatatattcggggtataaaatcgcgcgtttgcgttcagccctgtcatagcctccgaaaaacgcaaggccgcaggcatcaccgataacggcttttacaatcacctgttcccggggatctaagaaatcagtcagcttcatccggtactggtcctggacaatctgtttccattcaagcacctgatcaataaaaggccgctcgtcttgtctgaagtgctggtaaatatcgctcatgttctttcctttctatgtaaagaggcttggctggtgccaagcccgtatcaaactgtcacattcaagtatacattgcgatcatgcggtacaggccccaaagtcccgtcgtagcaaatcgaagcacgataatcgctacaatcggggatatatccagcatggcaatgggcggaatgatccttctgaacggttctaggtacggttcgcaaatcgctgcgagaaaccgtccgaccgccgtttctctcgtactcggcacccatgacataaagatatagataatcagggcaaacgagtagatgtaaattaaataactcagaacggaaaaaatttgataaagaatcatcctgctttaccacctctgatgttcgtcttcatttatgagctccgaaatcgtgccggaaacatcgacattatcaggcgtgcacagaaaaatatccgaaccgattctttgaatgtcgccgccgatagcatagacggttccgcttaaaaagtcgacgattcttttcgcctgatcatgctggatgcgctgaagattgacgacaaccgcccgcctgttctttaaatgatcggcgatttcctgcgcttccgcatatacacgaggttcactcaacaccactttagaggatttctgaacactttgcaagcttactacgttctgcttccccgccggcttctgggcgtaggcaggctgtttatctttctgctgttcgtgttcttccggatgatccttctctgtttcaatgtattcgtactcgtactcctcctcatccattgagaaaaagtttttcaatttatttttcatgctcatttgtttacaccccccgtttcatttccgactaatgaagagccgattcggataaaagtagcgccctcttcaacagcgatttcataatcatttgacatgcccattgaaagttcccggcacggtgcgtttgtctgattcagctgctgcacctgatccctcagatcacgcaattgccggaagcaggctctgatcgtttctgtatcgtctgtcaggggagccatcgtcatcaggccctctacagaaatgtttctaaagtcagaaagctctctgataaaggggatgacctcctctgttttcaaaccgtgcttagacggctcacgcgaagtattcacctgcacaaaacagcgaaccgcatgcggcgcccgtttttcaatctcttttgccaatgacagtctgtctaaggaatgaatataagatacacggtcaacgaccgccttcacctttctggtctgaagactgccgataaagtgccactccgggctgcctttgatgacatcctgcttgcggataagctccgtatcccggttttctcccagacttgtaataccagcatcgacggcctcttgagccctttcggctgatacgtattttgtaaccgcgatgacggttacatcttcggggcttcggcccgatctgttacatgcttcgtttattctttcgtttatatgtcgtaattgatcagcaacacgcaagataacttatgcctccttcattccgataaaggacatcatgcgtcccgttttccctttgtcgcggcggtgtgaaaagaataattcatgctctcgttcagtgcataaaccgctgactgaaatgttttcttccggaatgccgcaatgtatcagaagaaggcggtttacctcttttaaatcaagctgatactggcctttttccgtttcacatatggcggattcagccgaaaaaggcagcgcccggacttcattaatgacgcggtcgtcgacggtatagcttactgcactgatagacggaccgatgacagcctgaatatctgttaagcgtgagccttcttcgtttacccagcgttccgtcatgatgcgcccgatttgtctgaccgtccccttccatccggcatgggcagcgccgataatggaatttaccgggtcataaaaatacaagggcacacagtctgcaaaacacagggccaaaaaaagattcgtatctttcgtatagagcccgtccgtcccgcggaatgcggaggaatagtctctcgccccttttcctttatccccggccgtcacgtgtcggacgcggttttcatgtgtctgatctgcgaatacccaggaatccagatcagtaccgcataaggacgctatgacttcacggtttttcacaacatcatgagcttcgtcccggacgtgcaatccggtatttaatgactcatacggaggattgctgacacctccgtttttggttgtgaatccggcgatgacctttgtgttatgctgattcacatgattccagtcttctatcatgagtgccgagggggtggtaaaactaaacgggtgatatgtattcatgaggatccaacctttcgacaaacattaaaaaagcgtaatttcccactcattttaacacaatttcaagcatacgtttagcggctgattgaaaaatcggataaataaatgtgccggaaacattgagatttccggcattttacaagtaaagggaggattacgctcccccctttggttcgtttacacgcactaagatgacatcttccccaattttaactatatttcgccaaggaatgatcatttcctcttcttttccgaaaaaaccgagaacttttccgctcccgcctaaaataatcgcctgaattttccccgttgtcacgttaatatcaatatcaccgatgctgccgagtttttttccgttcgacacgtttaccacatcttttatttgaaattcagatatgctgatcattcgtatcacgcccttcgcccattctttttcctattatatgaacggccgggctgaaccttgtcacatcgggcaatcttttttgcggctgcaccaggtgaggataaagctcagcatgactttcgtatagtctataagctcatcaacggacacttcctcgtttacggagtgggcgttttttaaatcaccgggcccgtatattacactcggaatcccggcattataaagccaccctccgtcagttacggtttgggaaacatcaatgaccggctcctgttttttgacggctgagtgtgaggccgccaggacagaaactgccggatgctccgggtcgatttcaagcgccgggaacacctcgcctctgtcttcaatcatggaagagccgccccatttgaacaccggcctgttctccctgagccacagatcgctgtcagagacacgatttatatagtcttcgatttcagcggctgcttgttcgtgtgtttcgttcggataaaagtggacggtaatccataatctgcattcatcggcgacaaacgctgcgtgccttcccccttcaatgacggcggggttgattgtattggtgccgggcgcaaagccgggatagcttttcgttaccgcccagtggcgctccagctcacccaaggcagtgatgattttcgccattttttcgattgcgctcgctccgaatgcgccaccgcccgcatgaatcagattgcgcctcatgccgtcatgaaatgtttttttgcttttcaattctatccagccggtgattacaccgccctgcccttgaatatgcagtctgctcgtatcggcgacaaccgcaaaatccgcgtaatagccgcgtttgcagcattccagcgtccccgcctcaccgacttcttctccgatcacagactgtacaataaggtcgcccgcaagcttaatgcccgcatcatgtatcagctgcagagcaaaaagaacacacgccaatccccctttcatatcagcagcgccccttccgatcagcatgccgtcttttacgagcggctgaaacgggtcagtatcccagtcttcaccctgaacctcggccacgtcaatgtgtccgtttaaaatcaggctttgatgccggtttgaatccgtcccttttaaaacgccgactacgttcggatcttccggatacacatcccacatatcgaccgagcagccggtttcttttaaaaatccggcgacccacttctgagcttctgccgtatttcttgccggcggggccggagtcggaaaggctatcaacctttcagcaatatgtattaagtcgtcccgccgtttttccgcctggtgcagcagcatgtcaagctgattcattgaaaatctctcctttggctgtatcaaaaaaaccgtttcatcaaatgaaacgggtaaaaaacggatcttcctccgcttttttcaccgcttccctccgccggcatgatccggatcaggtccgttaagggttgagacaaacgtctctctcagctgcatggcagcacccccagggtgaacgttatgttattttacggatgatgccgcttttgcacgtgttaaaaacgggcggccgttgttccatatgacattgacaggcatatcgaaaaacgctgtaagccgctcatcagaaagcatgtctctgattttccctgatgcgaacacctcgccttgttttaaaagcagcgcctgatcaaataccggcagaatttcttcagcatgatgggtgacataaaggatggacggcgcattttctttttcagcgatagacgtaatcgtgtccagcagctgctctcttgccataaaatccagacccgtcacgggctcgtccaaaatcagcagttccggatcagccataagcgcccgcgcaatcagcgctctttgcctttccccctgtgataacgtctcataccttctgtcggcgtaactgatggcgcctaaatccttcagaagaccgatcgctttttccctcacctgttcactcggggtttcgtacagcccgattgaggcgtacgcgccgctcagggcgatttcaaaagcggaatccgcggcatataatttgtgctgaagtcctgctgaaacaaggccgattttccttctgagtctgtcaccgagctctgttttgccgaaatggtggccgagcacctgcatctctcctgaagtggggaagtaatatgagcataacatattcagcaaagcggtttttccggctccgtttaatccgtacagcacccaattttcgtttttctcaacgcgccagttgatatctttcaagatccatttgccgtttctttttaatgatacattgtccagatgtaaaatcattgcgctttcccccgtttatttattcaaattttcttaaaacttttcatattagaatacattacttttttgcagacgtaaaccggcgcatgaaaaaagcctttaacacaatgtttaaaggctttttccgttattgatggatattcttattcatttgtttaatggctgccttttcaagccttgagacctgagcttgggatatgccgatttcttctgcgacttccatttgggttttcccctggaaaaagcgttttcgcaaaatcattttttcccgttcgttcagtcgtctcatgccttctttcagagccagctcctcaatccattgtgtatccttattgcgctcatcactgatctggtccatcacgtagatcggatcgccgccgtcattataaatcggctcaaacagtgataccggatcttggatggcgtcaagggcaaacacaatttcttcatggggcacttcaagaactttggcgatttcctctgctgtcggctccctgcttgtctcactgattaaccgctctcttacttgaagcgctttatatgcgatatcgcgaagcgacctcgagacgcggatcggattgttatcccgcaaatatctgcggatttctccgatgatcatcggtacagcgtatgttgaaaacttaacattatggctgaggtcaaaattatcaatggatttcattagtccgatgcagccgacctgaaataagtcatcaacatactctcctctgttgttaaacctctgaatgacgcttaagacaaggcgcagattgccgtttacaagcttttccctcgctgaatcatcgccctcatcctgcaattgcttaaacagctttctcatctcttcattcttgagcaccggtaatttggaggtatcaaccccgcaaatttcgactttatttcttgacacgtttttccctcccactaggagctgctgtacaacgttaagtatctcctcgggtgggaaaaatatgcaccggctttttacagaaataaacatccgtctccgacaatccttgcagcagtaagggccgtcagatggaaaaaattttacaccattttgttaaactcttttcgcagtcttttgataatccgcttttcgagccgtgagatataagattgtgaaatgcccatcatgtcggctacatctttttgggttttttcttcttctccgataagtccgaaacgcagttccatgatctgcttttctctatcgtttaattgctcaagcgcttttttcagaagttttttatccacattggcttcaatgtcttttgtaataatatcatcatctgtaccgagcacatccgaaaggagcagttcgtttccgtcccaatcaatgttcagcggttcatcaaaagacacctctgaacggattttattatttcggcgcaagtacattaaaatttcgttttcaatacatcgtgacgcatacgtcgcaagttttattttcttctcaggattaaaagtgtttaccgctttgatcaaaccgatggtgccgatgctgattaagtcctcgatattgatgcccgtgttttcgaatttgcgggcaatgtaaacgacaaggcgtaagtttctttcaatcaggatggcccgcgccgcctgatccccgctcggcagctttaataagagcacctgctcctcttctttagacaaaggcggcggcagcgcctcacttcctcctatgtaatacacttcatcacttttcagtccgagtttcatcagccatttataccacaaatatgtcagacgcagcttaagttttttcatcttcctcccccttctaaatacaacgcgttttgagtatgatgaataacagacttttcgtcaggatacatgtttcacagcctttccggtcagcatcttcggatgaacgattccgtcaaattcaccgtccgctgatagtggtttcgtgctgatgccgatcaggcatttttcacatgcgatcatctcgtcttttgttaaaatcgtgacgtaatccggctttaaacagagtaaaaattgattatcctggccgacgcccctgtatggaatcagcctcagcttatccgcatgccggaacgattcatcaagctgctctatcacttcaagcggaccggcggaattgatgatgtccgtttccttttcgctgagaatcggagcgaatttgtcaatgtggagaatcatgaccggcgttttcgtcagcggatcatacagctgatttccggaatccaccaaacctttcgcgcggattgtctgtccgctgaattctgcctgaaccatgacaagttcatcgtactgaatggacttcgtctcgatgtcttcgattctcttttttgaaaaaaaccatacagccggaaatccgatgacaacaaacatccagctgatcgggtcgccgaagccggtctggctcgtgaccataacgccgttttgcacaattgattctgtctgcagcagggaatgtacgccgatcattcccccgccgacgagaaaggtcgcgaaataaaaggcgaacaaattttgaaaaaagtaccgaaaccgtttaaagccaaaagccgtaagcacgatcacaactgaaaatgccatttttcccgccggatgctccacaaagggagaaacaggcgtaaacatcagaagtacaatggttgacccgatgaaaccgccggcggccactcttcttttttttacctggcgttttaaaataaaggcggttaataaaagcaaaagagaatcaaaacaaaagttcaacagccaaatgacatccagatagattttcacatctgacccctttcctcttttgtcttacatatctgtttctctctcttgtttcataagtataaagcaagctctgtgggaaagtctgtcaattaatgttgaggggaaagtacaatttttaagggataatcgttttatttgtcgagggccgggaggattgattcctattgaccgccgcaacaaaaaaagcgctgccgtgtcttggcagcgctctgttttaatcgttaatataaagttttccttttgccgtctgtctcgtttcatttccgtagtcatctcttacgataacgtcaatttttgctccgcttgctttgatagaagaggtcgccgtccagtaactctcatatcttcccggagaaatttctctcagcggaagctccgttgcgttttggctccccgcccgcgcgtttgtcagaggcagacggataacgaaggttgcgtctaatttcttcccgcttgaaaaggcgattttcactgattctccggcttttaattctttatccgctccgggaaccagccccgaaatgacgggagcgttgtaattgacatcgattaccgtctttttcgttgttttgttacccgcttcgtctgaggccgtaaccttgatctcattgctgccgttttccagaaggattcttgcttgataagagccgttattcacttctgcttttttgccgttcacctttacctcttttaaatgggcgtcataagcttttccttttacggtcactgcttctttatttgttttatctccgtttgccggactgtcaatcgtcacatccggcttatcctggtccaatatgaccgtgacagggcgtgactcatctgttgatcccctgtctgtcacagatgccgccgtcagccgattggcatctttacggagtgtgacatccgcctggaaattgccgtctgcaccggctttcgtttcagcggcggttttaccgttattggtaaggcggacagcggttcccggagaggccgttccttttaccgtgattgtcttcttgtttgtaaacgaccggtcatcaggtgacgtaatgtcaggcacaatagcttcgtagttgaccagagcccggatcataaagtttccgtctgatttatcggcttttgaccagctgccgtcgagatattcccaatttctgttcgaatacggactgccgtcatcagatgacagggccggtgaataaggattgggtttcgtctggcggaacactagataaaaatcctttccgactgcgattccttttgagctgagatccactttcgtccattctccgtttcgaagcgcttcagcttggaacgggccggcaattttgctgcccggggccccgtcaggtccggatgcatcgtaaacttccgcttgaaattcggtgccgcccggatcaggccagtccgcgccccaaaatttaaagaggcctcctgtcagcataccgtgttcttttccgtctttaagcgtcatcttgaccgcggatttgctgcctgccttaaaatatgacagcgcggcttcttcggtcccgttatcataggcaatttccccttcatagccgatatacggcttaagcttggcgtttttttcagcatctcctttgatatcaacagaaaattcactgttgtaaaagccttttgcggctgctttgattgtataggagccctcgtacgcctgaagcgaatattcccctttatcatttgtcaccgccggctcaattgcggcatcctctacaacataaagcacagccccttccaccggttcgcctgttgactgattggtgatggttccttttaacgtaccggacggcatttgctccaaggtaaagtctgcctgtgcggttttgtctgattgaatggaaacttgtttcacagctggcttaaatccgtaagcctcagctttcagcgtgtagtttcccgctttatgagacaggctgtagcttccggttgcagggtcggaatacacggatttccccgtctcggcgacactgatttgcgctctgagcggcaggagattggtttcacgtttcaccgttttctcgggtgatttcaccgccggtttagcctctttcggactgacagcttttttcttcagatgaccgggcgttgtttgtctattggatttccttttttcggctgctttgccgagagagctgcttgaaagccggacatcatcgatataccatccgtcttcattgagtacttcgtctgactgcatattaaacataagctttatgttttggcctttatacgcagataaatctgcttcttcatcgttccatccggcggagtcaccattgtaaacagccgcctgctcccaatttgattttccttccggaagaacgaacacatacccgtaatcaaagaattcttcgagcttgtgccagcttttaaattgcaaaaacaaccttcctgaatccggaacctggatcggaggcatcaccaaattcatattggctgaatcggcataaggtccggacaggttcgtcgcatatactttatctccggaaaatgcagcgcctggccctgaactcgggattccccattcccattggtcatgtgtcccgtaactgaaccagccggccggctgtgattcaaaatcctctttgtaccccgccgtaatgcttggttttacgtcagcccggtacgtatcagattctgcggaatgacctccgaaatcttttattgtccatttataacttaccgtgctgcccgttacgtgcggaatgtccgcctggtatgttccctttttttcatcaccgctttttcgaacggcggcgatcgttttccactctcctttatcaaactgataggaaagtaacacctccgtcacacttacatcatcttccgccgtaaccgttaacgggaggtttgcacctttgtaagcttctgagacgggttcatgatgccagctgggcggattgtgatcttcacccgcagaggataccttgccttctatgcttcctattccatctgttacagcagaaacagcgtcaaaagcattgactaagccgtggccgtaaccgttattcggtgattccggaaaatcggagtctgtcagcttttcggcggtgcgcgtcaaaacgtcttccatttcatcgaccgtaatagaagcgttcgcctgccgtagcaaagccgccgtcgctgccacatgcggtccggccattgaagttccgttccagccgccttcatatgttcccccaggaatagaggaacggatattcactcccggtgccgaaatatccggttttgtttcatgatacggtgaggggccttgaagtgagaaatcagcgagtttcttttggctgtcggtcgcacctgtcgcaaatgcttccggataattggccggatttgcgattgaaccgggcccccccggtgtaaacaagtctacatttcccgcagagaattccggaaaaatccctgctgctctccatgcattcaccatatcgcggtaccactcatcgattcctgagccgcctgcccaggaattattgacaacatccggcgccatctcgggatgaggagtaccgtttttatcttttggcgcaagcacccattcaccggcatccaaaatgtcggcatcggttcctccatcatccgaaaatgcttttactgcgatccatttcgcgccaggggccacaccgatttgatttgagccgtcaggttctgaacccgtcatggtgcctgttacatgagtgccatgttcaaggtcatcgtagggcgcgtcttttttagccacggcatcataccagttcatttcatggttcggcactgcggggtttttaggatcgtacccccggtatttttccttaagcgccggatgatcccactgaacccctgtatcaatggaggcgacaaccgtaccggtgccgtcgtaccctgaggcccatgccttcggcgcgtcaatttgactgatgttccattcaatgcctccctttgctttgatctctttttgttttttcttcatttgaaaaggagcttttgattgagtaagctgacgcttttcattcggaagaactttttctacttcaggaaatgaggcggctttttccattacctctttcgaagcagtgactgccattccgttgacaatataataggaatggatatgatccgccttgcctttctttttttgtttttccaaatatgttttcatattttgctgcgcatcatgagccgccacttttaaagaagagatgacggctgaccgcttttgatattcggtttttgccacggaaagcgattgagacttggcgtttttttctgcttctttaactgcttttttcgtattggctttctctttaaatttgatgagaaacgtgactttatcacttttttcaaaacgctttttgactgaatcggaaatcttatgctgaatgctcttagaggcagaaagatctttggtgaaagaaaccgctcccggtgtgctgttcgctccggccgtacccggaaacagcagtgaactgacgacaatcgcgcttaaaacggagcctgtccatctttttctcgtttttttcttcaatcgtatccccccttatctggaaacgcaatattaaattggtatcccccctcataattggaatcgtttgtaatttcgatgttgtacgttaaatgtagacaatcttctattcagatattgtcacattctgtcagatggtcacccgaaatcaaaaaacaatcaaatcgtcgtaggaataaagtttctttttccgctgtatgaatcattggggataggaaggaagactggtcgtgaaaaagaaaaaggacaaaaccatgtggtcttgtcctttttgcattatccgcgtttgttgcggtttcttaaaaatgtaggaatatcgagggcatcatcagccggctgtgacgtatgacggttcaccgtattttgatgctgtgtttcttctcgtttcggctcacgtttcgcagcaggctgactttgagacttcaatccttggttcaaagtcggacgctgcggttttgagtcatctttttcctgttcgataaaaccggtcgcgatgacggtgacgacgatttcatctttcagattttcattgataactgaaccgaaaatcatatttacatcagggtcagacgcagaagcgacgatatcggctgcttcctgcacttcgtagaggcttaggtttgtacctcccgtaatgttcattagaacaccttgcgcgccgtcgattgccgcttccagtaacgggctggagattgcctttttggcagcttccgcagcacggctttcgcctgtagcaatcccgatccccatcaatgctgaacctttgttggacatgatggttttgacatcggcaaaatccaggttgattaaaccaggtgtcgcgataaggtcagagataccttgcaccccttggcgaagcacattatcagcttcacggaatgcttcaagcatcggtgtgtttttatcgacaatttccagaatgcggtcattcgggataacgatcagcgtgtcaacggcttctttcattgccgtgataccgcctgcagcctgcagctggcgttttcgcccttcaaatgtaaacggtcttgttacgactccgacagtcaaagctcctaagtccttggcgatttgcgcaataaccggtgcggctcccgttccggtaccgcctcccattccggctgtaacgaacaccatgtcagcgccttttaacgcttcttcgatttgttctttactttcttcagcggcttttttgccgacttccggattcgctcccgctccgagaccgcgggtcagcttttctccgatctgcattttcacttccgcttttgacaggttaagagcttgggcatcggtatttaccgcgatatactctacaccctgtacttcgttttcaatcattcggttgaccgcgttattaccgccgcctcctactccgattactttaattgatgctaagccgtctatgtttgtttcgaaatccaacatgctaaatcctcctaatctgccgaatgactatcaatctattcccaaaacatgcttaatagttttttcattttgctcggtttgttgtgttcggcttgtgttttttgttttgcttttggacgctgctgcgcctctggccgctgatgatgttcttcttcgtaagagaccgcgatttcctgcacggcttcttccggcatatgaaagcctatttttctcccctgaattctggcatttcggcaggcaaattgtatcaggccgacacccgtcatatactgagggtctcttacaccgatataattcgggcttgcgacccttacattgtgcctcagcacttcctgtgccaatgaaagcactccgggcattgcggcctgtccgccggtcagcacaaagccgccgggcagatctgtaattcccatatgctcaatttcggttgcggcaatctccagaatctcttccactcttgcttcaataatattcgcaatttcctgctgtgtaaaagattgcttttgattcgttcctatgacggtgacttcgaatacttcatcttctgaagcctcatcgtagaatgcatgtccgaattgtttttttactctttcagcctcttcggtggaagtgcgcaatccgatcgatacatctttagtgatgttttcgcctccgagcggaatgacggctgtctccttcaggtgcccctgttcaaataccgccaccgtcgtcgagccgccgccgatatcaatcatggcgactccgaggtttttttcgtcttttgacaaagccgccgaaccggccgcaagcggctgcaggcagatatcagtaatttcaacgcccgctctctccacacagcgaagtaaattatgtaagatcgttttggagccggtaatcagcgtgccttctacttccaggcgcactccgagcatttttttcggatcggtaatttcatctcttccgtcaacgataaactgtttaggaatgacgtcaacgatcagctgctcatgcggcactgacacgacctgtgccgcttccatcaccctgcggacgtcttcaacgtgaatttctttgttttcactggaaacagcgacaacgccgttcgtatcttgaatatgaatataatttccattaacgccgacaatggcttttttcagcggaaaacctaccattctttcagcttggtcaaacgcttttcttatagaatgaacggtttcatctatatcaacgattgagccttttttcaacccttcagacggtacatttcccactccgataatgttaagggaatcatctgtcatttctccgacgatcacttttgtattggacgtaccgatgtcaagactgacgtaaagttcattgttgttcattctatggcacctcctcacatttcgatcaattctattctattatttgcggaacaacaatacaatgaatgtggctttacaagtgtgtaacaaaaacaacagcatcaacaaattcttatctgatttctcacaatttatgtttaatgaaactattcgttatattctatgtatatcctcttttatatcgcattttttttattttttttagagacggcccaccttaccgtaaaatttcttgtcacggatcacactgtgcaattcagatgcaaatatacccgctttccactagtctacactaagatgaatcttcagaaaagctatagatattgccagaaacatccgaaaaaagaagaaacaggaggaaaattccaaatgcaatgctcactgcagaaaacacgcccattgcattgagaattttccgcttgttcggcagccatatccccggcagaaacaaacatagtcataattattccgctatcggttatatcggctgccccgctgattgcaatagattcttttgaatcaccttgaaaatagttctttagaactattcagtttcttttttcttgtcagatttacctttgttaaattcttcaaaatacgtagcgacttctaagtggataattccctttttcccgccgtccagctgagaaacgatagaaggataggtcttcatccggctggcaaacgttttaatggaagctgtaactacatatccgtcgttcatatacagcttgatccggtcctgatccatttttaccggagtgtagtagatttcagaaatcgactgttttaacgaaccggaaagcttatcaagctgttccgccattttgacccgctttttcgcgtttgtccagtcaactaaaatcgggcccgcgtcatccggcgtgacttcgttcggcagcacggtcccgttctccagcacttcataatacacatcgtttcgctgcagatacgcgatggtcttatattcttcaatgtgaattttgactttgttaggaaatgcttttgaaaggtccgcctttttcaccagcttgttctgctcaatcatttcttctgtttttttcttgttcagactccagaactcggtttgtccgttatgtatatcagaaagctcggtgatctttttttcagatacgttttcgtttccggaaacggtgacagaagagactttgctgatcggcatctgcaagtacacgatgatcagcaccatcataaaaaagagcacaatgaatgaaatcagccggcggtttgctttttgtttccgctgctctttgattttcggaatccgttcttcaatatttacgattttttctctttcatgatttgggttcactgcctgtccacctcactaagaatgaaacagcttgacattcgtctgattgaaaaacaaacggcatgctgtgatgccgtttgacatttgttaaaagtatatcacatgagctcatgtaaatcagagaaccttttaacgattcccgccgatgatttcaacttctgtatgcatttcgacatcatactgctcacggattgtctttttcacatattcaatcagatcgaggacgtccttggcagtcgctcctccggcattgacgataaaattcccgtgcatttcggacactttcgctccgccgatctgatgtccttttaatcccgctttttcaacgagattgccggcatgattcggcagcggatttctgaatatgcttcctgcgcaagggctggagtacggctgagtattttttctgtaatctttgttttgctgcatctgcgccgtgatggcttcccgttccttttgctcaagcttaagaactgcctcgagacacacgccgggacgttttttctgcagcacagacgttctgtagctgaaatccatctcgtcgttcgtcagccattcgattgtgccgtcttcaaataagatacgggctttcacaagaatctcactcatatcagatccgtgcgccccggcattcatatagacggctccgccgattgacccgggaatgcctgctgcaaattcgagaccggacattccttttttactcatggaagtcgcaaggcggacgactgaataaccgcctccgaccgtcacctgatcgccgtcaatctccaaatgatcgagacccgctcccagcttgatgacaactcctcttatgccttcatcaaggacgagcagatttgaaccccggccgataaccgtccatggcagatcatattttttcacaatattcataatatctttgaccgcttccacacggtttgggatgatcaaaatatccgccggtccgccgattttcatcgttgtatgattcgcgagcggttcttgttccagcactttgccgacttcgcggtctcttaattcctgaattacgttctccatcgtaaacctccgcattccatttgctctattttttaatgtcttccatgatactgtacagtctggctgccgcatccggaacaccgagtgattttgtccgctcactcatgtcttttaacgtttcgtcattcattacgattttgtccagcgcagcgatcagtttttctccgctgagctcggtttccttcagtacgatcgcagcgtcatgctggctgagcgcctgtgcattgacttcctggtgattggctgtcacatacggactcggaatgagcacactcggaatgccgagtgcggtgatttccgcaatcgttgtcgctccggctcttgccacaatgacatcaattgactgtaagtactccggcatttgatgcaaaaacggttttgtcaccatattatcagcggcttttccgcctttcagctcagccgttactttctcgtaatgcacttccccggtaatataaagcacttggtaaggtctcgttttcaactcttcctgcatatcgataacggcacggttaataggagccgcacctctacttccgccgaaaatgagcaccgttttttgattgtctttcagcccgaattcagttaatgagcggcctgtcttaattgagacgacttcagaggctctcgggtttcccgtaaaaacaactttttcagcaggaaaatgcgattttgcctcttcaaagcaaatcgccaccttattaacatatttcgagagaaacttatttgtgatgccgggaaggctgttttgctcatgaatgatcgtcggaatccccatttttgccgccgcgtatacaaccggtccgcatacatagccgcctgtaccgataacagcatcaggtttaaattcttttaaatacgatttgcttttcttcacgccttttaagaaacgcatgacggtttttacattttcaaaagaaagctttcgtttgaaaccagtaatttcaatggcgcgaaacggaatattttcccgttcaacaatttttttctcaagaccgttctctgttccgatatacaaaaattccacatccggatgccggcgctgaacttctttaataaaagcaagagccggataaatgtgtcctccggttccgcccccgcttactgcaatacgcatttgtatgtcccccttaatcacatagcgataaccctgttttttaggacagggttattgatgttgtctgtttttttataaataacgaatagatcatgagtgatgaggcaagatacaagatcaatacctcgagtaccggcttacatttaaaagcacgccgaccgctgcgagcatcagcgtcaatgatgagcctccgtagcttaaaaacggcagcgtgattcctgttacagggatcagccccgtcacaacgccgatattaatcatgacttgaatagcaatcatagaaataataccgatggcgacaaagctgccgtataaatccggagcgccgagcgcgatcctgacgccgcgccataataaaatactgaacagcagcaatatgagcgagcctccgataaagccgagttcctcagataaaatagcaaaaatgaaatcggtttgcggctccggcagataaaaaaacttttgccggctttggccgagccccatcccgaacaggccgcccggacctacggcatagagcgactgaatgatctgaaacccgcttccaagcggatcctcccacgggtttaagtaagaggtgatccgtttaatccgataaggagcggacagaacaagcgccgcaaatccgcttaaaccgatgagtccgagaaacgcgaaatgagcgattcgcgcaccggaaacaaaaatcatcacgatgcacgtgcccaccatcaccgtccccgttccaaggtcgggctggcacatgataataataaatgcagaaaacacgattccgagcgcgggaacgaatccgcgtctgaatgacgtaatgttcttctgtttttcagaaagaaatttagccagaaacgcaatcatcgcgagtttcataaactccgaaggctgaatgctgaacgctcccactccgatccagcttcttgaaccgttccgcaccattccgactcccggaatcagcacaagcacgagcagaaaaaaacaaatgatcagaagcagcttcgaccatgtgcgccatgtccaataatctacattcataatgaaaaacatggcaatgacgccgattcccgcaaacagcaactgccgtttcgcaaagaaaaacgaatcgtcaaatttataatccgcccaaaccgcacttgcactgtaaaccataattaatcctattgttaaaagcaataacgtaatgataactaataacaaatcaggcgatgtttttttagtagtcaaagcaatcgacaccccaagcataagtcatttagggctgccggataaacagagacaagcccttacttaagcatatgcacggcatctataaacatgtcaccgcgttcttcaaatgttttgaattgatcccagcttgcacacgcaggtgacaagaggatgacgtctccttcatttgagagcgcaaacgccgcagatactgcttgttcaacattatcgacacgtttgacatgttgtattcccagctcattgcccagtttttctatcttcggcgctgtctgtccgaacgtaagaaccgctttgacattgtccatatacggtttcagatcgtcaaacccgttgccgcggtcaagtccgcctgcaagcagaataaccggtgctttgaaagcggagagcgctttgcttgtggctaaaatattcgtcgctttgctgtcattataaaatttacgattctgaatcgcagtcacatactgcagacggtgtttgacacctgtaaagcttgtcagcaccttctgaatcgctttattagacgcacccgccgtttttgccgcggccacagcggccaaaatattttctaaattgtgcgcgcccggcagtacgatgtcatcaacaggcagaatcgcttcatcgccaaacatcagcattccgtctttaatgaatgcgccgcttgacagctcctgagaaactgaaaacggaacagtgccggcttttccgccttcggcaagccgcacgactgtttcatcgctttggttcacgatggccgtatcgctctcaagctgatgcagatacaccttctgctttgctttttcgtaattttcacggctgtggtggtaatccaaatgagcgtcaaacacatttaaaatcaggccgatttcaggtctgaacgcatgggtccccatcagctggaacgaagaaagctccgtgacgatccattcatcaccgtcagcatgataagccacttcactggcgacagtgccgatatttcctgcgatcagcgcctttatcgagtcagccttcagcatttcgtagaccagggtcgtcgttgttgttttcccgttcgagcctgtaatgccgatgaatttagcattggtgatataatacgcaagctcgatttccgtccagaccgggatgcctcttctttgcgcttcctccaccatgatattttcatacgggattccgggatttttgatcagaatggtaatgtcatgcttgtcaaaaagtgatgtcggatgctcaccgcagatgacctcaattcctctttctgaaagcctctgggcaggttcgttttcttcaaaggctttttgatcattcacgacgacgttaatgcctttttcatgaagaattgacgcagccgcatatccgcttttcgccagtccgaggaccagaaagttttgtttttgcaaaaaaagttcgttttccacttataaccacacctcgatgtaaattcctaaaacggcaagcagcagtcccgcagtccagaatgtgacgacaactctccattcagaccatccgaccaattcgtaatggtggtgaagcggactcattttaaagattcgttttcctgtcgttttaaagctgataacttgtaagataacagataatgtctcaataacaaatactccgccgataatgacgagcagaatttcaagcttcgtcagaatggcaacggtcacgatcgctcccccgagcgcaagcgaaccggtatcccccataaatacttttgcgggatgggcgttgaatacaagaaaaccgagaacggcgccgacaacggcaaccgagaaaatcgcaacatcatattgtgactgattccacgcaaggatcgcaaaagcgccgaatgcgatagccgcggtaccggacaagagaccgtccagaccgtctgtcaggttgacggcatttgaacctccgacaagcataaagagaacgaggataaagtacccccagccgagatcgattgacagatgtgtgcccggcactctgatgccggttgaaaaatggcaataatgatatactccataaaatacaatggcgataatgatttggccgatcaatttctgcttcgatgttaatccgagattccgtttcattaccactttaatataatcatcaagaaagcccagcaggccgtacccgattgtgacaaacagcagaagaaacatttccgcgctcagctgcgaaaatttctgcgtcatcacaattgctgtaatggcgatggatacgataatcatgaccccgcccatcgtcggcgtccctgattttttcatatgtgatttcggcccctcttccctgatactctggccgaattttaagcgtcttaaaaacgggataagaatcggagatatcagaacactgattaaaaatcccattattattgtaaataaaatcacttgctcaagcattgctcttttctcctcccgtttcgttcaaacgacatacgtagttatcatattcacattgtttccccgtaattcttttcatttccctcattctaacactctttcctgttttactttttattcagctcaacaatagctcttcccgctacttcggcgtcatcaaaatcgaatgtttcattgccgatctgctgataagtttcatgcccttttccggcaatcaggaccacatctccctttttcgcgtttgcaatagcgaaaaagatggcctgctcgcggtttgcgatactgtgatagtaggttccttctactcctctttccatatctcttaatatggccagcgggtcctcgcttctcgggttatctgaagtaaagatcggttcgtcggcaatccgcaccgcaatttccgccattttcgggcgtttcgttttgtcccggtcaccgccgcagccgacgacgacgaaaagcttgccctctgtcatgtctttgcatgtattcaggacgttttccagactgtcgggcgtgtgcgcgtaatcgacgacgacaggaaacggctgattgtggttcaccaattcaaaacggcctctgacaccttgcagctcttcaagagcgcttgtgatcgtatcaaacggcagacccgctgcgatcgctgtcgccgctgcagccagtacgttatacacattgaaccggccgacgagtgaaaccgtaatctgctttgttccttttggcgtaacgagttcaaagcttgtgccttgcgcagagatctcaatttgtttcgccatgacatcggcatcgttttcgattccgtatgtaaggatgtgcgccgccgtcactctttcaaagtaagcactggctttgtcatctgcgtttaagacggcccgcttcggcttttcatggttgaaggaaccgcccagctgggaaaacaggaggcttttagcctgtctgtagtcttccatcgtcttgtgatagtctaaatggtcctgcgtcaggttcgtgaacacggcgatatcataatcgcagccgtgaaccctgccgagtgacagagcgtgagaagacacttccataatagctgtgtcaacatgctcatcattcattttcttgaacgttttttgcagtgtgacgctttcgggcgttgtatttttgaccgggaatgtctcatcgccgattttgatgtacatcgttccgattaaaccggtctgtcttcccgcttttttgaaaatctcgtccaccatatgcgtcgttgatgttttgccgtttgtgccggtgatgccgataagctgaagctgctttgtcggctgcccgtaaaacgcgtcagaaagaacgctgagcgcccgctgtgaccggcggacgataatgacaggaacatcgacgtcaagctctttctcggcgacgatggccgctgcgccgttttctgcggctttttgggcgaaatcatgcccgtctaccgtatacccctttatacacacaaaaagactcccttttctcacttccctggagtccatctcgattgaagttatgtcagggtcatgaaagtcattttgaacaggttcggtcattaaatatgtaagcagctttgtaagtttcattgtatcaaacctctcagaaattctattcattcttttatcatgataaccgtttataaaagtcagaatggcttttaaacatacagttcatattttagcgtaaataaaaggatacatccagttaatcttaaaagttatcttctttttttctctttatgataagaggcagccgaaaacaatcggctgcctcaaaaagactcattcttcactcaagtaaacccggatcttagagccttcttttactttcgttccggctgcaggtgattgttttacaattttgctgccttttcctgaggagtcaatattcaaattgacaagcagcgactcaagatcagagacagacatccctacaacattcggaacctctattgtttttgtgtcgttccattgatattttttctcgatttgattttttcgcggtttaatgccgagctccggcagactgtctctcattatatttccgacaatcggcgcggcgacggttcccccgaattgaattgtgcctttcggattatcaaccgcgacatatacgacaaggctggggtcatcagccggcgcaaagccgataaaggagacaatgtggttgttttcgagatatttgccgtctttgactttttgtgccgtacctgttttaccgccgacgcgatatccttccacaaaggcattccgtcccgttccctgagcgacgacgctttctaaagcgtatctgatctgctttgacgtttcctgggaaataacttgccttttcgcaatcggtgattgtttcttaacggtttttttcgtaacgggatcaacccactctttggcgataaacggcgtgtaaagcgttccgccgtttattgctgcggatacggctgccacctgctgaatcggcgtgacggaaaccccttgtccgaaagcggttgtcgcctgttcgaccggacctactctgtcaagcggaaataagattcccgttccttccccttgcagatcgatgcctgttttctttccaaagccgaagtccttaatatattgaaacagcttttgttttccgagccgctccccaagctctacaaaccccgggttgcaggaattttggacgacttcaagataagactgcgaaccatggccgccctttttccagcatctgaggcgggcgccgtccacctcggcgaatcctctgtcataaaagtggtctctttgcaggtttactttttgctcctgcagcgctgccgcaagcgtaatgatcttaaaggtcgaacccggttcatacgtgctccacaccggcagattccggttgtaaacggacggatccactgattgatagtcggccggatcaaaatcaggacggcttgacattccgagcacttccccgttttttggattcatcgcgaccgcaatcattccgtccgggttgtatttcgccgctgcattgtcgagctctctttctataatcgtctgaactttggcgtcaatcgtcaatttcatatcaagtccgtctttcggaggggtgtaatcatctgcttcatccggcattttcttccccttggcatctgtataaaatttcacagatccctttacaccttttaagtcatcatcataataagcctccaatccgagaaggccctgattatcaataccggcaaaaccgagaacatgggacaaaaagcttccgtacgggtaatggcggatgctgtcttcagccacataaacaccttttaagtcgagcgctttgatttctttcgcttttttattagaaattttccggccctcaggtgagattttttctatagaggttttctttgtaatgtgtttgtagaccttctcttccgacatatttaaaactgacgcaaggagcttgcccgttttgatgggattttggatctggcgcggtacgacaaagacggtcggcgcgctcttattagttgccagcttcacgccgttccgatcaaggatctctccccgttcaggctcaaacggcagattccggctccaagaatccttagccagcgaagtcagcttttctcccattacaaattggacatagcctaatctgctgtcaatgatcaaaaaaatgatcacgccaaaaagcaaaaccagtaataaacgttttcgaaccgttacatttgaaacgcgcaagggaccgtccactccttatttaggcttgtttcaatttatgcctcagcttggacacatagaacggcggagcataaaaaagaagcccgcagcagctgcgggcttctctgttccgttaatcaggatttttaaatttcaccttaatcacggtattttctttcagttctttaccttttttgacactttggcttgcagcgtaaccttcgccgctcacatcaatgtgaatgcctgatactttgctgaattgaagcacttcacgtctcgaccatccggacatatccggcatcgtcaccttcccgtctgtttttaagaagattttctgattggtgatcacatcttccccggctttcggatactgctcttttacggcaacatcgctgccgatgacaatcggtgtgagatgttcatttttcgcttccttctcagcatttgtaactgtcttgtctgtcaggtcaggcattttttggcttttcgtttcctcctgaccggcatctgacttttccgtcggttcgatgttcaggtagtgcaggctgtttttcatcgtcgggttaaaaatttccgcgacaggatcagaactgctttgaccctcttttaattgcggctgctgaacggctacataaatgacgagcttaggatcatttttcggcgccatgcccatgaatgaaaacacatagttgctcgttcccgataaatatccgcccgttccggcgatttgcgcggttcccgttttccccgcgacatcaaaaccttcaattttataaggttttcccgttccgatgtctgacgtcacgacttctccgagcaggtttcggacttgtttggccgtatcggctgagatcggcgtgcctacttgttcgggctttgtctgcttgacgacttttttcgtatcagggtcaacaatatgatcaatgacgtaaggcttcatcatttttccgttattggcaatcgcagtgaccgcctgaagctgctggatcggcgttatcgccgatgcttggccgtaagccgtagacgctttatcaaaatcatatttgaagttaattttgcttgaaacttcaccaggcagatcaatccctgttttttgataaagtccaaatttgtgcagatactcattaaaccggtcaaatccgagtttttcgtttgccagtttggcgaaggcgacatttgacgacctcatgagaccgtcatgaaaacttgtcatgccccagccggcaccgttgttccaatctttaacatgtttgccgcccactttataggttcctgatttgtatttctcgtttgcagaaaacacattttcctgcatcgccgcggcaagggtgaaaatcttcatcgtcgaacccggttcatacgcgtacgacactaagtcgttataataattggtgacgtttctgatattcgggtcaaaactcgggcgctgccccatcgcaagcactttgcctgttttcggttctacgacagccgccatgatttttttcggtttatatttttccgccacttttgtcatgctgtcttctaaaaaggtttgaattttctgatcaatggttaaatatacattgtcaccatttttaggtgcggtgattttttctttgctgttcggaagtttccagccggatttatcactttcgtaagtgacggacccgtcgcgttccgtcagatagttgttcagtattttttcaagccctaaagagccttggatctggtttgttttttcgttcacatcggcatagccgagaacatttgacaaaaatacgccattcggataatagcgcttcgtatctcttaagaaagaaatacccggaagattcattttttcgatcttttgttttttcgcataagagatatcacggccggctgaaccgaattccacctgcttcgcgccatccctgtttaagatgtccagaatctcgcttttatcaagattaataacactcgccagcttttccgctgttttctctttatccttgacatactgaggcttcatctttttatcaagtatggcaatgagcttatatgtcgccgtgtcctcagccagcactttgccgttccggtcaagaatggagccgcggctcgcttctatcgtccgctttttttcgtgctgctcggtcgcttttgttgcaagttctaccccgtttgctttaccggttaattgaatgtacgccattctcccgagaatgacaaagaaaaagagagcgaaacaaatactcagtatcgctgctcctctgttcataaacttattttttttaggcatgggttatcattcctgtatgtttttcacttttttatctttcagattcaaaccgtgctttttggcgatatccatcaggcgctgaggctggctcaagtcagccgccgttttttcgagatcagcgatctgcttattcttctcagatactttctcttccagtttttgcacctcaatattggattggtatgccgcatatgcctttgatacgataaacatcgaagtggagagaacggcaatggcaaataggacgagcagcaccttttccccaagtgtaatggaagccctctttttgacaatcacctttttttcggggcttatcactggccgttgttgtttttcctgctggtaagctaagttgctcataggctgatgacctcctttaatcttgtcatttgctgcccgttattttcgtttttccgcaatgcggagcttcgctgagcgggcgcggttattttcttcaagctcctcttttgatgccgtaatgggttttctcgtaatcagttttaattccggctcaaattcttccggtatcacaggaagacccggaggcagttcgggaagtgatgatttttccttgaatgtcgtcttgcacattctgtcttccagcgagtgaaaagtgatcacagatacccttccgcccggcttcagcacctctatcgcttgcaagagggcctcttcaaatacttgaagctcgtcgtttacggcgattcgaatagcctggaatacgcgtttggccggatggcctccgcttcttctggccggagccggtatcgcgtcctttattagatcgaccagttggccggttgtttgaataggcgatttctctcttgcctcttcaatttttctggcgatttgcttgctgaatttctcttctccgtatttaaagaaaatccgtacaaggtcctcataccgccattcatttacgacttctttcgccgtaagggcggccgactggtccatcctcatgtccagcggtgcgtcatgatgatagctgaatccccgttccggtgtatcaagctgcggagaggatactcctaaatcaaataaaatcccgtcgacactcgtaatgccgtgttcatgtaaacattcttttaaataacgaaaattacttttcaccaagatgagctgtcccttatattcggacaatgtctgctttgcgttctcaagcgctgtgtcatcttggtcaaaggcgatcaggcgtcctttttccgataattgctgcaataaatatgtactgtgcccggcgccccccagggtgcagtccacataggttccgtccggtttgatatttaaaccgtcgacggtttcacgaagaagtactgtcttatgctgaaacatttgtgtcggtcccacctttatcaggaatgaattgaattgtcagttgttgttgtgatgcacgaagatccattatatatcaaatccaatcatgttttcagcaatttcagcgaatgaatcttcttgctcttctgtgtattgttcccagattaccttgctccacaattcaattcgattggaaaccccgatgacaacacattctttttccagttttgcgtaattcagaagagatgacgcaatattaacccttccctgcttgtccagttcgcattcggtcgcaccggaaaaaaagaaacgggtaaacgcgcgggcgtcttttttggtgagcggcagagccttcagcttttcttcaatcagcttccattcattcatcggatatccgaaaaggcattggtcaagccctctggtcagcacaaattgctcaccgaggccttctctgaattttgcgggtacgatcatgcggccctttgcatcaatagtatgctggtattcacccataaacatgataaggacccccactttctcccctaaactcaccactatccgccacttctctccacaacctcattttacactgtttaaacataaaaaaaaaccctgaactattcagggttctttaaaactttatttcaaagtttgacaatctgatgttggttttgaaaagaaaatggcagatgtttgaaggttgtgaagaattttggaccatagcggttcaaataatacatcacattccagatccgctcctgcggtgcgccgagcggtctgatgctgttttggattctttcatagtctcgcagcacaaaaccttctttttcttcaattcttttcgttaccgtccgttccaaaaacaagagctgatcttgaatgaaagcggcattcttctgtaagagcggctcaaggcttgaatcgaccttaagcgcttcgttccttacacttttatggacagcttcaatctgcgacttcgcctgctccatcacagtagaaaactcttccggaatctgcttttcaaaataagtgtctttcaggtgtccggtgccgtgttcgatcgcttcctgaagcgggatattccgttctgaaagcttcttttcaatatggcgctcaaggatcgtaatgtttagtctcggcactaccggtgtcatggcgaagcccattaatgagaaagcctgcttcagctcgccccaataattgacttctcccggtcctgcgataaacgcaagagtcgggatgagaaactcctgcataagcggccttgtcacaacgttattgctgaaacattccggtttttcttccatatgggtatgaagttcgtcattcgtccacttcaggtcaagctccttaatgacaaaaacgccattttctttttcaattaagaagcgctctccctcatgttcgtaaaacaggttggcttgttctttgtctgattcaataatcgggtgataaccggcttcccgcataagacgctgctgatctgacacggctttggcaagttcattattgtgttttaaaatctgctgaaacattcccgtttccagctttttaatcccgggatctcccgaattcaacaggataaggccttcttcttgaaacaagtcggcgatcaacagctcaaaaaagtccgtgaacgtctctgatgagcgtaaacatcgcatcacattttgaaggagcgcgtttgtatgatccgtttcctcaaacgcagcgaacacttcttcaatccacgccgcacatttttcctgatcaagcggggttttagccgccgatgtttttttccagtaagactgcggaagtttctgtttcaccggcccttttttctctgttgacgtgtgcacataattaatttcttccagatcgtgatcttcacccgccacccagaaaatcggaacgacaggtatctgtaacgcctcttcctgctgtctggcaagtacgataatggagataattttatgtatggtgtaaagaggccccgttaaaagaccggcctgctgcccgcctacaaccgctgtgctttttggatctcttagtttttcgatggaggcctgcatggctgcggagtgaaatttttcgtgataggaggataggtaatccgctaattcctctctggcaaacggccgtgaagacaggtcacgaagccgctcttgccatacatcctcagaatgaatatcataatcaaaaaatgaagacatgttttctccatctatatagtgctgcacaaacgtattttgacttttgatggaaagttcagttagctgcatctgtctggaacttcctttctccaataaatagttaggtttccgaaatgagtatagcatgttaccggaaaacctcaaaagactttgtttcagtttctttctaacgcttttatgctgcggtgtaaaaacgggagatgaacggccggcaatccgcggttttccgcttcttttacaaggtagccgataatcgcgtcagcttctgtccgtcttcctgccatgatatcaacaagcatggaagaatgatttttttccgtcaggccgcaaacttcgcaaaccctgttccacgcttcctctttatcggcaaggccaagtattgcctccgcttcttcaaacacgtttctcatatattttttgtaagcggcatttgtcagcagctctccgttttgcacgcgcagcaatgcagttaacgggttgatgcacacatttatgatcagttttcccgttagaagacgataccagtcgttttcatcatatacgggaaaatcccggtgcatgccggaaaagatgcttttgagcgtttccggacgggacgcgcggaatacactccatcttacggctccggctcctgtatgttcaacggcatgatccgatattcttttcgccccgtgctcaaccgtgccgacataaagtgaatgatccgtacgccattccttgatgtcgtgtatgtgtcccatgccgttttgcaaaaacaacacattcgtcccttttattgtctcaagatccggcaaaacgacgctgagctgatgctgtttcacagctgcgattaagaggtcgtatccggaagtgatgcctgtttgcgctctgcatgacgccgtaaattcttttccgtctttcacaagccgtataccgcacgtgttaatcgcatcagcctgctccgtccgccgcgttatgaccgttacctgatggcgggacgataagtagcaagcacataaaaggcccaccgctccgccgccgataattccgattttcacactgtcacaccctatatctgcatttttccatattatcatagcagaagccgctccaaattacttcaatttcgttttgagcaataagacagacaaacatattatagttggaattttcaattaaagcgtttaaaataatggtagaacacaacaaagggggagtttgtgttgaaaatagagcgcctgctcatcaactttaaaacactcgaagaatttaaaaggtttaaggaatacgggatgcaggaattgtcgatgcttgaagatcttcaggataatatcattgaaaatgacagcacctcgcctttttacgggatttacttcggggataaactagtggcgagaatgagtttatatcaggtaaacggaagtgcgaatccgtattttgatcagcgtcaggactttttggaactttggaagcttgaagttcttccgggctatcaaaacaacgggtacggcaaagcgcttgttgattttgccaaatccttcagaatgccgatcaggacaaattcacgcatgaaatcagcagaattctgggataagatgaattttgagcccgttaaatatgatatggcgcgtgataaaggagaaaatccttatatctggcatcctgatatggacggtgaaatgacttccggggaaacagcataataaaaaaccggccgggacactgccctcaggccggttgatcttacaggccctgcgccgattttctttcgtcatctttcgaattgaccatccttctcgccctgtccatgatgtcaattaatgctttgtaatcttcttctgtcatctccagcttgtttctcaagctttcgttttcctcacgcagatcctcgacttctttttgcagcgcggtcagctgctctgcgagtttttctttttcatgacgcacatccgctgcggctggcgactctttaaattgctgcagaaacaaaatcacatcatcaatggacagctctttttctccttccgtcctgcggatcggaggctgcttgacggttcccggcagattggcggaatgcaccccgatctgctttcttaattccttccgctgttttttcgccagttctatccctgactgatattgtttcctgacataagaattccatctgaatccgcaggcggcagccgttctcgtcagtgctctgcccacttcttcaaaagcggaaagctgggtcccgccttcccgaatgtgcctgagcacgacttcagccagcagcaaatcttcatcttgcgtccacgcgtcttgtctcgttatcgtcaatcgtatctccctccatatttgctcatttacctcatacatatgccgctgatagattagatagactattggcgctcacaattttttcgccggaagcaggccggagggagaaaaaaagaaaagcgcaggaaccgagattcccgcgcttttcttcatacattaattgctttttacatttatgtctttgccgttgtatgatccgcatgctttacatacacggtgagacaatttcatctctccgcatgacgggcattctgtcataccaggtacatttagtttgaaatgtgtacggcgcaatctttttttcattttagaagttcttctaaaaggtacagccattattcccacctccttaaagagttaagattcatcatcttgtgttaagagctttttcagatccgcaagtcttgggtcgatctgatttttcttgtcttcctcagaaatcacttgccaatccttacccacttggggagcggctccttttttttgttcagtttcacaaaagatttgcataggaatttctaaaagaatctcttcttttacgatcggagttaagtcgacggtatcgtcttcagcaatatgaacgtcctcatcttctatatcatccgtcttatgaaatctaaacagttcttttgtcgcgattgtaaatggatacggcacatcaactaaagttcttgagcacggcaaaaccatttcgcctgaaatcgtaaagtcaaacgaaacctgcttggattcaatctccgcgcggccctttacccggacgggagaaatgcggcggatgtcagaattcaattttgtcagctcattcaactcaactgtttcatcaaattcaaagctctttttcgccatttgatgaagctgataaatcgtccatttcatttgtatcacctcaggaaagcaacaaacatgattatagcttttcagaatgtttttgtcaatattttttctttacagcataatgccgccgtcatgcaatcgttgacagccggatgggctatgcatacactaaacaaaacggacgcaaaatgcacttcatttgcaaatgtaccacacgaagcaaaacatagcaagaaaggcgggacaaatatgaaagcagtcggcctggttgttgaatataatccctttcataacggacaccgctatcatgcggaacaagcaaaaatcaatacggacagcagcgttgcggcggcggtgatgagcggcccttttttgcagcgcggggaaccggccgccgtctcaaagtgggcccggacaaaaatggcgcttgaaaacggcgtggatatcgtcattgagctcccttatatgtatgctgtgcaaaaagcggaattatttgcgcgcggcagtgtttcgcttcttcatcaattaggatgcagcagcttgtttttcggaagtgaaaacggccggatcgaaccatttattgaagcgactgaagcgttcagccgaaaggaagctgactgcaccgtgattctgaaagaggaattaaaaaaagggctcagctatccggccgccgcctcaaaagcattttcacacgtattcaaaggtgaggacatgcttgacctgtctaagccgaacaatattctcggttttcactacgtcaaagccatacaagcctccgggtctgccatgaagccttatacgacagccagaatcgcttccgggtatcatgacgccgagcttcccggagataacagccggatagccagcgccacaagcatccgaaaggcgctgatagaaaaaggaacggcggccgctaagaactttctccccgaagcgtctgtgcgcgagctggacgcatacaaaaactcatacggattatggcacagcactgaagactatttttcatatgtaaaatacagcctcagcactttgtccgcagaagaattaagccgaatctatgaagtggaagaaggcttagagcacagaattctgcgcaccatcagacaagcccggtcctaccgcgaaatgatggaattattgaaaacaaaacgctatacgtggacgagattgcagaggatgaacacgcatattctgacacggacaaaaaaagaagatatgcaccggctcttaaagccttcaagcgctccttatatccgtcttctcggaatgactaaaaaaggacaggcatacctgtcagcaaagaaaaaagagcttaccgcaccgcttgtcagcaagctctcttctttctctcatcccgctctggatttggacatatcagcgggacggatttacagcctgccgataaaagaacctgaacgcacactgtttgagaagcaggaattttcacaagcaccgatccgctatgatgaagacgaaaaacgttttttaaatgcatagaaaaaaagcacctgactgtatcaggtgctttttactttcagcttatccaaataatcaagtgcgtcctgcatcgtatcgacaggaacgattttcatatcggacttaatcgctttcgccgtttttactgcatttttataatcagagttttcagctccgttttggttcggcgcaaagaaaatatcttttcccgctttgtctgcggcgacgactttctgatcgattccgccaatcggtccgaccttgccgtcaacgtcgattgttcccgttccggctatattgtagccttttgtttcgtcaggttttgtcagctgattgtaaatttccaaagacatcatgagaccggcagaaggcccgccgatgttttcaatactgaaatgaagatccggcttcactttcacgttccggtccgtatataatgctacgccgattccggctcttttcggatcgtccgggaatgatttcagcttaagggtaactgtcttttctttcgtgtcacgttcaatgttaaacgttactttttctcccgcttttttgctgctgatataatcaatcagcttttcagcggattcatattttttcccgtccgcgctgatgattttatcaccgacctttatttttccttttgccggcatattggagacgactgagctggcgtaaatgccgttaaatgagtattttacctgtttgccggctttttgataagcggcaatgaccgcgttttcttgagagcttttcatcatctgcagttggcgcttcatatagtctgaatcagtttcgccctcttcttttatgctttcatcagggacgatttcatcgtaaggatgcaccttcgcccaaagatatgtatacggattggcggggcctactttgacagtcatcaaggaaaggcttcctttttcagggtagcctccgtccaccttaatcagcggtctcagctctgatgcttctcccggctgtgtaatgtaatacggaagcttaataaatgtaatagcgattaataagatcaggatgataaacacccagcgaaaatgttttgctttcatatgagttagccctcccagttctctatttcttgtttaatccggccgatcatccgatctgcggcctcttcgcctgctgtgatcatatgatcaatgttggcaaaagagcttgagctgaatgattcgagagaagggcggatcatgacgtctgcggcaatggtctggtgacggaccaattcattttgcagtatatccatactttgcatgattacatcaaaaatatgtgccgctttttccgtttttttcaccctggatacgtcagaggcgatgacgatatcagcgcccatatcctttacggcggaaaccgggattctgtcgactaccgcgccgtcgactaaaatacgcccgttcattttttgcgggacgaaaacgcccggtatgctgatgctcgcgcggacggcttcggatacggagcctttcgtaaaaacgagtttttctccggtctggaggtcgcaggccacgatgccgagcgggatccggagttcttctatcggcttgccgaacgtatacgcatgaacgagctgcctgatgcggtccccttttaaaaatccgagcttcggcatcgtataatccgcgtacagccgccgcttaaatgctttggcgacttttttcatcgtggccacatcatgcccggccgcataaaagctgccgactaacgcccccatgctgctgccggcaatcatatcaattggaatctgatgcttatgtaaactggataacactccgagatgagcaatgcctcttgcccctcccgaacctaacgctaacccgattgtaggtttggccaacgcgatgaaccccctatagaaatcctatacatgaattctatggtctaaattgaacccctatgctcgtatattagtacaggatgacgaataggtacttgcccggccgtcctaaggtctgttctatattttatcatgatataaatatcagtgcgcaattttagcatcggggaggtaagaatgaatttgtctaagtttcatacatttttgatttcattgttttttatttttttgacggcgacggttatttcacacccgcaggcctcattcgaagcctccaaaaccggtctttccatgtggtgggaggtagtttttccttctttgcttccgttttttattctttctgagcttttaatcggattcggcatcgtcaggtttgtcggccttttactcgaaccctttatgcgcccgattttcagagtgccgggggtcggcggatttgtactggctatgggcatggcttcaggcaatccggccggcgcaaagctgactgcacggctgcgccaggaaaaacaaatctccagagtagaggctgaacgcctcgtctcttttaccaattcatccaatccgttatttatattcgcggctgtggcggtcggcttttttcataacgcgtcactcggcattcttttggcatcggctcactatctcggaaacatcgccgtcggtttgacgatgcgttcatacggacggaaagaagaagcggcgtataccggtaaaaagacgatcgtgcttccttcgctgaaagaagcatttctggccctccacaaggcgcggctttcggaaaagcggccgctcggtaaaattttgggcgacgccgtcacctcttctgtacaaaccttgctgatggtgggcggttttattatattgttttcggttttcagccgcttgttatcaatcgtacaagtcatggatgtactttctgtatttacaaacgcgctgctttcgctcttccatcttcctgtaagcctggacattcctcttatcagcggaatgtttgaaattacgcttgggagcaagctggtcagtgaagcggatgccgccttgctgccgaaagcaatgattgtgagttttattctcgggttcagcggcctttccgtacaggcgcaggtagccggcattttatcggaaacagatatccgatttaaaccgttttttacggcgcgtatccttcagggcatttatgccgctctatttgttcttttactgtggaagccgctttacctcgcattggacgaaccttatcagtcggtattcctgcctttccgtgatcaaaacgcggccacggctgcagttagcgggtggaacacactgatcgaaatcggtcccaccgtaacgctggcggctctggccgtatacgcactgatttattgttacaggctgtctgcacggataaaaaaaggatgagacgctaaacagcgttctcatcctttaaatttttgctgcagcgcctgttcgacttccggaggaacaaactctgaaacaggcccgttatattttgcgacctcttttacgatgcttgaacttaaaaaagagtactgattgttcgtcatcataaaaaaggtttctattgattcgtcaagcacgcggttgacagaagtcccctgcatctcatactcgaagtcagaaacggctctgagccccctgataatcgccttcgcctgcttttttttcgcatagtcgatcaacagtccctgtgacgtctcgaccgtaatattcggtatgtcttttgtcacttctcttaacagctcacagcgttcctcgactgtaaacagcggctgcttcgaagaattattgagcacgcatacgtacacctgctcaaacacgtttgctccccgtctgataatgtccagatgtccgtaggtgacggggtcaaaacttccgggacatacagctatacttgccacatcattaccccctatttcggtatatcgtcactcctgtaagcccgtaaatttcccttcttgttacggaaagcgcgccgacagcttcaggaagcgcaacggctttatcatgctccgctacgacaaaaccgtcttcattcagcatgttctgctcatcaatcatttcgataagcgctttcagcttttgttccttatacggaggatctaagaaaattccgtcaaaacctttttcccgtttcgccgcggcatagagagcccgctctgcatcattgcggtatacctccgctgaagacaggagatcaagcgcttttatattcgcttttaccgtctggatggctttgaaatcacgatccacaaagatacagcggtcaaatcctcgcgacagcgcttcaatcccgagaccgccgctccccgcaaacaaatccagccccgttcctccgtcaaaatacgggccgatcatattaaaaatagactcttttactttatccgtcgtcggccttgttgatgtgcccggcacagcctttaaggctcgtccttttctcgaaccggaaattactctcatttttcacaccactttttctgaaaactttgatgtttcgcttcggctgagccgttatgtacaaaaacaatccttatcttaacataaagcattctttcaaacaatgaacgcgaaatcatgtatacatactcacattcctgtcaagactacgtgtaacagcatcaatgaatgatgttgttgccaaccgcggagaagacttacgtttccccataagttcttcctccggtttctcctctccctttgccttctccttaacttgttaaggaatagaaggaccccgcaggtatctgcggggatttttttatatgccgatcttataatcgtactctttcgctttatcaagctttgattcaaattccagctttaaaaaaggcttataagaaggctctactttcttcacgtatgaataagatgaaatcttttccatcgttttttcgatcagctccatatcgcaatacagcacaacgtatttcagccgtttggaaacataatgaacgttgccgaattttctcagcattttactgtgttttaaagaatgcagatatacgattatgccttggcgcttgctttccatcatgatcacccgcctgactttctgttcattttatgtaaaagacgagacggccgtctcgtcaggaaactttgcatccgcacccgccgccggaaccgcagccgccgccgcaggatgacaggccgtcaaaataaggattccccgtcggaacttttacatgctccgagacggccgttccgagttcaatgctgatctcgtcaagcagcgactgaagctcagtctccgcttttttaaattcggccaccttatcatttaaatccagctcccgcttcatttctctcattttgcgggaaatctctctatagtcaggatgatatttgccaaagcgctgcacatcctcatactgctctttaatgctcataaaagaacgaataatccgccgtgcctcttcatcttcatggagacgcttgtaacaatcgcggtaattttcagccgtctcagactgcagaatcatgccggcaagctgctccgcttcactttgaagcctgacggactcaactgttgcatacatcaatacgcacctccagttgttagtttaccatgaaaccagccaattggaaaatgcgggcgttaaaatgccttttaatcctgcgaacgcatggcgtgaaccatctgcatcatcatctgcgccatctgaatcccgtttgagaattggcttacccgatgcggtatcgttttttcgtaaaaattcatcatgtccagctgaaaggaattgagatcgtccggttttctcgcaagtctgcggtaccagacggggcgctgccgtataaaccgttttcgttcctcatctgcagatatgaattcctgaacctcttttcgcatacacgatccccttctttaatccttcctgaacgaaaaaggatgttgtccggagccttgccggggctgctttgtgctgctgcccgaaaattggcttaaaaggctttgcaatgatgaaatggactggctcattttattgatctgctcattcatttggtttatatccatctttttgacggcagtgaccatttttgaaacgaaatcgtttttttcagctgattcctttttggtttccgcttcagaagaaggctgaacggtctcgtctttaaaaggctcccacatcgaatcgtcctcaccgaggagaacccaattttcatagacttcctgccagcttctttgttccttgcgaacattttgaatcagtttgggatgcttttttacgaattgtttaaaatcatcgattgattgccgtgattgctgattcgccacaattctcaccccctccgaaaagttttgcctgctataatgtatcggttcaggcgccttaatgttcgcctaaattacgaaaaaaagcaggtatgtgtaaaatttattgattccggcaggagcccgcccgcgaaaaacaaaaaaaccgcgggggacgcgcccctctgcgtttttttactcccaaggcttaataaagttctgcgtataatatttccggtccacgccgacaccgaggtgcgtgtaatccgggcttaacagcgcctttctgtgtccttcgctgttcagccagccctccacggctgcaggaccgtccacatagttgtacgcaatattttcaccggcctcctgatatttcacatcgccttttttcaagcggtctttcagagtcccgtatttctttgagacatgggagaaatacttgttgtctttcatgtccttgctgtggccgaatgccacttttgcagcgccttcgtcccatttcaaccttgcaagtccgtgtttcacgcgaatgacatttgtaatatcgagaatctgctgctcactcgctcgttcaatgtcgtcccattttttatcggaaacaggctcgggttctgtcagtcttcctctgtacatgacctcatacggcctttgttttacaagcgtttcggcatcaaatgccctgatgcttgacagattcccgtcaaatttgtccatatacagctgaacatacataccgcctatcttaacagtgggacgggtattgatatcttcttcagaaaactcaaaccggtacgtgtttcccttgtcagtcacattgacaaacggggcaacctgcgtcgttttaaaaacttcgcctgtcgattcgccgatcttaaacggttttgcgttgatgccgcttcccgaagcatataatgtcacggctttatcattcagaataccgacttgtacatattggtctttcccctggttgtacacccaccattcataatcataggcagaaggatctttccgggacggttccccaagtttctttttcacatcggcagcagatttccccatgagagaaagcagtccggatgacgggattttcagccgttttccgctcgcttcttcattggcagcatgaggctcctcctgattcgtctttttctgaggagccgatccatattgtataatcagaacatacgctccgtaaataagcaaaaggataacgagagccctggcgatatttttcaacctctcacccccatgaaatcaaaccgttcagttattgtttattcttatacagtacagcctatttgtaacgtccgtggtttatgtttaatgaataaacccctccggacctccgtcttcagaaatgtcagacagcgcccggcctgcttgctcatttgattgctcagccaaggaaagatcgccgagcgtgacaatgccgaccagttttttatcccttgtgacggggattcttctgagctgatgctcagccatcatatggagcacttcttccacagaagcgtcttcttctgcactgataacccgctcagtcattgcgtctgttattttttgagagttcggcctttttgaagcaattccccgtaatacgagatctctgtctgtcacgatcccgacaagtgtttcgccgtcttcatccacaatcggaatggcgccgacatccgcgtctttcatcttcaccgcagcttcatatacattatctaatactgtacaatattgcaagtttgacgtcatgagcttattgatctttgtcattgcggaattcctccttttttctgctactattgtcgtcaaatttttctttttgcatactttcaccgtatgaatcattgaaagtgtaacgctttcatactatgattgtcaggaaaggtaaattttaaaaggagggggaaggtttgaagtttgaaaacagcggtcttgaaggggtaacagcggagctcagccgcttgaatgatctgatggaaagcaaagggctcattctggcgggacaatgggattatgaaagagtgacttacgacaaaaagttttcagttcctgagggaacattttatctgcggattcaaggaacggcacaagagggcgatgtaggcggcagccgtgccgtaattcagctgaaggcccctcttttaggaaagcattattatccgcacggcgtagaatacggcagcgctgaagaatttccggaacatgtcgtcgcagaaagcaaggcgttactgcttgaattggcagagtctttaaaaacagtgcaaatgtaataaaaagtacagcatattctgctgtactttttttatgagacggtatgctcgatatacggcggctctgacggcgtatctttttcccgttccgttctgacccactgaaaaaagatgacagccaaatatgttccgtaaaccgcctcttgaatgattttcatcagcactgccccaagctgctgatcttccaaaggaggaagcgtgttaaacatctccggtccggataaagggatctgttccagcagatctaaaggaacacaaagcttcattgcttcggcccaagccgccgggtctgtatacgtggcatacatgggcgccccgctgaacataatgagcgcgcaggccggcgttaacagaatcccgtctgccataatgtaccccagcttcattaaaccgctgagacggggcagaccttccacctgatgcacaagcggccaccacataaaaaacgccgttacaaagatgagtccgttcatcagcgtgtgatacagcgaatccgttttgacggcatcaaatataaacgggatatgatacagtgaaaaaatgccgttaaacagcagcaaagcgataagcggcagtgaaaagaacgaaaacagcggctttacgacgggacggaaaatcacttttttccatgcccagccgggaattccggaaatcaacagcggcggtacgactaaaaacaaaaccgccatttgcgccatatgggcgctgaacatcacatgccccaataaatcaacgggacttccagcagccgcgtaaaaaaataacgcggaaagcacaaacagcaccttctccttagcggacacacgccctttatgccggctgcaccagtaaaagtaaatacctgttatcacggcagttatacaaaacagataagggctccacattgcgcgaaacccgaacatttccaaattaatcaactctctcactccccgccgccccgattaccaccaaataatcgtgacaaatgcaagcacggtgataaacgcgacaaatattcccgaatacagaaatagtgacggcgcttcatgccctttctggctcatatgcataaagtaaaacagctgaaaaatgacctggatgaccgcaagcaggataagaaacggcatcgtaaaccacccggcaatgccgtcagcagccaccgtcaaaaacgcgacgagcgtaaggccgatcattaaaccgaaggatatgacctgatatttcatctcctcggcatttttctttttccgatattcgagatccgtactgacagtccctctgtttttgttatcgtccatcgttatcccaccatccccatcaaatatacaacggtaaagataaagacccacacgacatcgataaaatgccaatatagactggccacataatatttcggcgcgttataaaggctgagccctcttttagcattccggatcatcagagcgctgatccataacagcccgaaggccacgtgtgctccgtgtgtgccgacaagcgtataaaacgctgagccgagcgcagagcttgtgatcgtaaatccgaactcgtgagtgtaatgcttaaattcatagatttcaacccctaaaaatccggctcccaataaaacggtaatcaaaagccacacctgcatttttttaaaggagaaatttttcatatgatacatcgcatacacactcgttaagctgctcgttaaaagaagcatcgtggcgataaacacgatcggcagctcaaacatatcagccgttgacggccctcctgcttttgattcccgcaaagcaaggaatgtcgcaaaaagcgaggcgaacagaaccgtttccccgccgagaaacagccaaaatcctaaaaacttatttttcccctccagcgttgctttttcaggagaagccggaaaggtttcagcagtcattttttcctgcagctgcattacgccttcacccctttatcatcattcggcagatcttctttgtgaatatgatagccgtaatcatcgaccacagagcgaagcagcatagtaaagaatgtgattccgagccctataaagataaccggaagcccccatgaataatcggagtggtataaaaacccgaacgctgcgacaaagagcccgaaggatatgataagcggcatgatggagccgttcggcatatgaatgtcctctactggctctgcaggcgccatcccttcatttccggcctgcttttcgatccacagcggatcaagtccccgtacaaacggaagctgtttaaaattatattcaggcggcggcgaagagaccgcccattcgagcgtacgtccgtccagccacgggtcgttcccgacgtatttcccttttatagaggtataaacaatattgacgacgagtaaaacagccgcgcccgccatgaaaaacgcaccgattgaactgatcaggttgccggtatcaagcccctggccgggcagatatgtgtaaacgcgccgcggcattcccatcaagcccaggaaatgctggatgaagaaggtaagatgaaacccgatgaaaaataagacgaacgaaattttccccatcgtttcatgaagcacctttccaaacattttcggccaccagaaatgcacgcccgccaggatgccgaacacaacgccgccgataatgacgtaatggaaatgcgcaacgacaaaatacgtatcgtggaactgataatccgccgcagcggccgccagcatgacacccgtcactcctccgagcacgaaagaaggaataaaggcgacggcatacagcataggcgtcgtgaatttgacatttcctccccagatggtcaatagccagttgaaaatcttaatgcccgtaggcaccgcaatcgccatcgtcgcaaccgcaaatatcgcattggcaatcggtccgagtcccgtcgtaaacatgtggtgaacccataccatgaatccgagaaagccgatcaaaacaatcgcaaagaccattgaggaataaccgaacaggcgctttctcgcaaatacgggaatgacttccgaaaaaatcccaaaggcaggaagaattaaaatgtatacttccggatgcccgaaaatccaaaacagatgctcccagataatcgtatttccgcccaattcaggattgaagaaattcgttccgaacaaacggtccagcatcatcagcgccaaaccgacggtgagcggaggaaatgcgaataaaatgagtgccgacgccacaaatgtcgtccatgtaaacagcggcagtctcatatatgtcaaaccgggcgccctcatgttaataatggttgcgagaaagttgatccccgcaatcagcgttcctaagcccgatatttgcagcccgagcacgaaaaagtcaatgccgtgcccttttgaattcagcgcaagcgacgcatatgacgtccagcctgcatcgggagcccctcctaaaaaccagctcagattcaaaaagattcccccgaagaaaaacagccagaacccaagcgcattcagaaatggaaatgatacgtcacgcgccccgatctgaagcgggacaaccgcgttcatgagcccgaataacagcggcattgccgccaggaagatcattgtcgtcccgtgcatcgtcataatttcattaaactgctgcgcacctacaaaatcgttccctggcctcaagagttgaatcctgataagcatggcctcaagtccgccgacgacgaagaaaaatcccccggcgatcatgtataaaatcgcgattttcttatggtcaaccgtcgtcaaataatcccaaagcaaagagccttttctctgctgtcctgtaagcgtattcatcatttgcgacctcccccctgatatctccctgtccttacttgttctccgctttcagaccttttaaatattcatacagcgcatccgtttcagcgtccgagagcttcggatacgtgcctgtcattttattgcccggtttaatgctgtccggatttttcagccaggcttttatattctctttattcgcatccttaatgccggccactttgacacgttcgccgaaggtagccaggttcggagccgttcttgccgcttcagcccgtttgtcattaggctcaaccgcatgacagctcaggcagtttttttccttaaacagctcttctccttgcgcggctaaaccggaatctgttgtatgcttataattcttcatcgctttcgtccattgtttaaattcttttgacggcagcggtttcactttgaaatccattagcgcatgtgaaggtccgcacagctccgcgcatttcccgaagaagtattctcccgcttctttgctgcgtttagaatcaaaggtcaaaaagaaagtattgtcgttatccgtattcgtatcgatttttcctccggctgacggaatccagaaagagtgtttcacatcggatgacttcagcttgaaataaacgcgttcatctgtgggaacgatcagctcctgacttgtcacaaatccgtaatcaggatactcgaattcccaccagtataaattcgcccttacattaatcacgagcgcatcctctgctttacggtttttcttatccatcggcgacgtatccgccagcgccaatgtctggatgacaaccgggatgacaagaataatcagaagcaggatcggaataacggtccaggtgatttctaaaaaacggttcccctccacctgtttcggtatcgtgtcttctccgacacgcgaccgtctgaatctcacaatgacgtaaaagaaaataactgctacgaccgcaacgacgacaaccatgataagtgtgctgagcaccgtcagatcatactgtttatcagccacttcgccggcaggcttgagtgtggacagaaacggttttccacagccgctcaataaaagcggcactaaggctaataatgataaaagacgccaacgctttaacatttcacccaaccccttttttgaatcagtacaagatgcacaagcagtaaatctgcttccagctgaaatacttcatttcctcattacttaaaatatgagattttttacttaaaattccatctatgtataaaagcaaagccgcttgattaaacaaaaggtcaaggcggcgtttactagttgtcattgtttgttttggcgatcaaacaagctcattattcaattaaaacagcgtgaagaccaccatcgctacaaaataaatggtcatgtaattaagcgaatagacaaacataagagttgcccacttcatgatgtttttcatacggaatcccatcagtccgagaacaagccatccgacattcagcagagtgccgagaatcacgatcggaagaccgagactgccgaggaaaaacggaagcggcagcagacatgcaacccagacaataatctgtcttttcgtcacttcaaagccgtgcacgaccggaagcatcggaatattcgctgctctgtaatcttccgtcttcttaatcgcaagcgctaaaaagtgcggaatctgccagatgaataaaatcatgaataatacccatgcgacaacaccgatgtgcccttcaaccgctgtccagccgattaacggcggcacggcgcctgatacgcttccgacaaccgtattaatcgtatagcggcgtttcgtccacattgtataaagaacaacgtacgtaaacacgccgataaaaccgatgactgcagccatcacggtggtcatcaaaagcatgataagtcctaaagcaatgagtaaaattcctgaccacagcgcttgattcggctgaatctttccggtaaccgtcggtcttactttcgtgcgttccattaaatgatcaatatcacggtcgtaatagttgttaatcgcacaagaaccggcgatgatcaaagaagaccctattaatgtaagaagcacagtgtttaaattgcctaaaaaactcagaccggatatatgtaacgcaagccacatgccggtaaaagtcgtaattaaattcgaattgacgattcctattttgataagtgaaagaaaatccttccacgccgtcgtctcttcaatctgtccgtctatagctgtatcatttaaaattctggaattagccataacgcaaacctcccttacaaacctaaagcaggttttttaagacctgcaactctatcatacaagataatgacctgtaaaaaaacatcctcttaaatattaaacgagaaacaggaatttatttgtgaactttttatgaattttaccatctccgccgatttcgtaataaagcggttactttatttctatcagacccatttggaataatcaaccccattatctaagaagtcttaattctattatatttttgtgaacaaacagaattgagaattgccacaaaacacatattcgcttacacttggtacgtatatcattttgtccagtttgttaagaaggtgaatgtaaaatgaataaagctttaaaagcgctcggtgtgctgacgacatttgtcatgctcgtcgtgctgatcggcggggctcttgtcacaaagacagggtcaggtctcggatgcggaagacagtggccgctttgccacggccgttttttcccggagcttaacgccgcttctatcattgaatggagccacagactcgcaagcggtgtctcaatcgttctcgtgctgagtctcgctttttgggcatggagaaaagtcacgcctgtattccgtgaaacaacctttctcgccattatgtccattatctttttatttttacaggcgcttctcggcgcactagcggttgtcttcggatcaaatgcgctcgttatggcgcttcatttcggcatatcgctgatctctttcgcttcggttctgattttgacgctgctcatatttgaagctgataaatcagacaaaaagctcgtcaagccgctcagaatcggcagaaaaatgcagtttcatatgatcggcctttcgatttacacgtatatcgtcgtttatacgggtgcttatgtgcgtcatacgaaatcaagccttgcctgtcctgacgttccgctttgcagcaggctgcaccacgggcttccgtcccaatttcaggagtgggtgcagatgggccacagaacggcagccctgcttctgtttgtctggattcttatcgctttcgcgcatgctgtgcgctcctacaaagaccaaaaacagattctcggaggctggatagcggctcttgcctttgttttattacaggcgctttccggaatcatggttgtttattcagaaatggccaccggctttgcactcgcccattcactctttattgccggcttgttcggcgtcttatgctatttcttattattaatcgcccgcttccgttacgaatcaaaacagcggaacatctgaggtacatgagaaggccgaagcgttagagcttcggcctttttacatacaaaaaacctgaccgcaatggtgcggatcaggtttttttaaattctacgctttttcaatctcaatcagtaaatcgcctgtctgaatcggttcaccgtttttcacatgaatctgctgaatcgtcccggagaacggcgcctgcaccgtcgtctccattttcatcgcttcattaatcatcagatgatcccctttgttcaccttcgcaccggtttgcgttaacaatttaataacggttcccggcattgatgctgcgatgtggcttgggtttgtccgatcggcctttaatttttcctgtacggatgatttaatgctttcatctttaatgaccacctcacgaggctggccgttcaactcaaaataaacgacacgtgtcgcatcaggctgcggttcaccgatagacacaagctttacgatcagcgtttttcctcgctcgatttccacttcgatttcttcaccgagcctcatgccgtagaagaaagtcggtgtgtccaatacggaaatatcaccgaagcgttcagccgttttaacgtattcagtgaataccttcggataaagagcatacgcgattgcgtcctgatcactcaattccatctgatgagtttctttccattcttctttgatgccttcaaaagataccggttcaagcagttcacccggtcttaccttaatcggcgtctgtccttttagaacgagcttttgcagtttttccggaaatccgccgtgcggctggccgatctgtcctttaaagagctcaacaacagaatccggaaaatcaagagtttcgcctttatcataaacatcttgttccgttaaattgttttgcaccatgtaaagcgccatatctccgacgactttggaagaaggcgttactttaacgacgtcgccgaacatgcggttgacgacgctgtacatgtctttcacttcattccagcggtcgccgaggccgactccttttgcctgctgctgcagattgctgtactgtccgcccggcatttcgtgattataaatctcagtatgcggagacttcatcccgctttcaaattcactgtaatattgacggacggattcccaatattgtgacagtctttcaacctgccggacatccatttcaggacggcggctgtttccttcaagcgcatgataaaatccgcttgcactcggctgtgaagtcagacccgccattgagctgacggcgacatctacgatatccacacccgcttcaacggctttggcatagagaaagacgccgttgccgctcgtatcatgcgtgtgaagatgaacgggaatatcaatcgtttccttcagcgctgagacaagttcgtatgcggcttgaggtttcaaaagaccggccatgtctttaatgccgagaatatgcgctcccgatgcctcaagctcttttgccatagaaagatagtatttcagatcatacttcgtccggctcttatcaagaatatctcccgtataacaaatcgcagcctccgccacttttccggtttcacggacggcatcgatggccagcgtcatccctttcacccagttcaggctgtcaaagatccggaatacgtcaatacctgatgctgctgactgccggacaaatttttgaatgacattgtccggatagtttgtatagccgacggcatttgatgaacgaagcagcatctggaacaatgtgttcggcacttccttgcggagatcttcaaggcgtttccaaggatcttcctttaagaaacggtacgctacatcaaatgtcgccccaccccacatttcaaggctgaacagttcaggccacagagcagccgtagggtttgcgatttttttcaagtcattggatctgatccgggttgcaagcagggactgatgggcatccctgaacgttgtatcggtcagaagtacggatttctgctctttcacccagtcagcaagcccttcagcgcctctttcatcaagaatctgcttcgtgccgcttgccggcttttcgccgatacctaacgtaacagtctggggcttatcaaacgcaggtttttctttttttccgattcccggaaaaccgttcaccgttacattgccgatataggaaagcatttttgttccgcggtccttctgtttaggaaaaacaaacagctcaggcgttgtgtcgataaacgatgtatcgtattgtcccgtcaggaatttttcatgctttgccacgttttcaagaaacgggatattggtcttaatgcccctgattctgaattcctgcaggttgcggaccatttttgcggatgcctgttcaaacgtcagcgcccatgtcgacagcttgacgagcagtgaatcataataaggcgtgatgacggcgccttggaagctgttcccagtatcaagacgcacgccgaagccgccgcctgagcggtaagccataattttacccgtgtcaggcataaagtcattcagcggatcttcagtggtcacgcgtgactgtatcgcatacccgtttgtaaaaatgtctttctgatgagggatgttgacggcacggctgtgcagaccgtggccctgcgcgacgaggatttgcgtctgaacgatatcaacccccgtaatcatttccgtaatcgtatgctccacttgtacgcgcggattcacttcaataaagtaaaattcaccgtccgctacgagaaattccactgttccagcgttgatatagccgacatttttcgcaagtgcgacagccgcttcacagatctcgtctcttaattcaggctgtaaggacacgctcggcgccacctcaatgaccttttgatgccgtctttgaacggaacagtcccgctcatacagatggacgacatttccttctttatctccgatcacctgaacttcaatatgcttaggattttcgatcagtttttcaacatacacttcgtcgtttccgaatgcggctttcgcttcggatttggcccgctcaaacgaatctttcaattcgttttcgttcctgacgattctcattccgcggccgccgcctccgagcgacgctttaataataaacggaaatccgtgtacttttgcgaattgttcgacatcttttaatgtttcggcaggcccgtcactccccggaataacggggatgccggctttttccgcctgctctctggccttgaccttatctccgaacatatccaaatgcgctgacgtcggtccgataaatacgatgccctcttcttcacagcgtctcgcaaattggatattttcagacagaaatccatagcccggatgaatggcatcaacgccgtttcttttcgcgatctcaataatcccttcaatatcaagatacgcgtcaatcggttttttgccttctccgacaagataggcttcatccgctttatagcggtggtaggaacctgaatcttcttttgaataaacggctaccgttctgatgttcaattctgtgcacgcccggaaaatccggatcgcaatttctcccctgtttgctactaacactttttggatggattgttgtgacaaacttttctcccccttggcctaataaatatgtagtttataataaaggaatatccgccctgtgtatacacttgttttttacagatacacagttttttccgcctgccgtctttttacccccttagacggaatcggttccctctttttcttcttttccgagtacttgacatgcatactcacattcaccaaaataccggcgctcgttaataacaagaacattgacgagcctccgtagctgataaacggcagcggaacacctgtgatcggaattaaaccgctgacaccgccgagattgatgaaagtctgtatcgcaatcatgctggaaatcccgattgccaagaggctcccgaacggatcttcacattttctcgcaatataaaagccttttaacacgataaaagcaagcagcacaatgacgaacaggacgccgaatataccgagctcctctgaaataaccgccataataaagtctgtatgcgactccggcagatatccgtatttttgaatgctttctccgagaccgaggccgaaaaagccgcctgagccgatcgcataatacgaatttataatctgcaggcctgatgtgctggcgtatttaaacggattttcaaggctttcaaaccggctcatgcgcccgggtgtcaaaatatcatcccatttcagatagatgatcgggctgacaaggagtaatacgattcccgccaggagaaccagtttcagcagcgtctttccgctgaatcccgagcacataatgacgcaaaacgcgattagaccgataatcatcgccgttccgaagtcaggctgaatggcgataagcgcacaaatgacgacggtaacgatcaccggcggcgcaactcctgtcaaaagctgatcgatgtagctttgtttcttcgcgtacaccgcggcaagatacagaatcagggtcagcttgacaaattcccccggctgaatggccattccgccgattttaaaccagctttgcgcgtttccggcaacatgtccgaaaacaaacagcgcgcacagcgcagccactgacgcaagcagtattattttctgaatcttttgatgggcaaacactttgtacggaaaaacggccgcgatgataaacagcacgagccctgcaatgacggcgaacagctgccgtttaaaaaaatagtcgctgctcacgccgtaacgcataacggcggtaatcatgcttgagctgtataccattaccaatccgaaactgcacagcagaatgatagcgcatatcaatgaataatcgtaagattttaacattcttttaaacataacatcctctttcctgcttaaagcttacgtttaatacttattgcgtattatattttactataattcataaacaatttacgcagtttctttatagtttttcggatgaaatgcagattaagagaccgtcttacgaaaagaagatgcaaaaataacggtttacggttataaaaaaacccaaaccgttaaatagtttgagtttgatcatttattttcctgtaaacgcgtcatgcaaagcagacagttctctttcaagtctgtccagcagttcttttccgtcgttttcatcaactaatcccaggcggacagcaaaatcgatttccctcgacagtccgaacatctgagtatccaagacctcttcgtacagaggacattgaggcatcgttaagttatccatttgtactcggatcagcttcaaaatcttctcagcatccagcttcaacagctcgaatgccttctgctgatggtcaactataatctctgaagccaaaagtatccctccgttccccaggcgagtacctaattcttctatttatcataaagggtatcaggtgaaattgcaagaggatttaagcagatgttatgataaaaatgtttcaaaaaatactcagcctgtatttctcagacatgatttccaaaagcttcacacccgcgatgctgttgcctttttcatcaagcgccgggccgaatataccgattccgaaattatacggcgaaatgcccatgatgcctcccgaaacgccgcttttggctggaatgccgaccttgattgcgaattcaccgctcgcattgtacataccgcatgtcaccataaacgtcttgcagattctcgccacatcttttttaatgacctgctccccggtttccggatgcttgccgtcaagtgcgaatacgcagccgattttggctaaatcaagactgctcatcttaatcgcgcactgttttgtatacaaatccataacctcttcaacatcgcctttaaaaatgccatattgcttcatgtaataacacattgcccgattgatcatggatgaactgaattccgattctgcgacatgtctgcagtatgtaatttcctgattattcgcaagtcttctgatgaatccgagcagataattcagccggtctttcggcgaatgccccttaattaaactcgtaacgacgagagctcccgcattaatcatcggatttaaaggcttgcccggattcactgtctcaagcttaatcatagaattaaacgggtcgccggtcggctcctgccccacgcagctgaataccttttcctttccgtaatccatcagtacgagcgccagagaaagcaccttcgaaatgctctgcagtgtaaatgtccggtcggcgtcgcctgccgtcagacatgtattttccgcatgataaatcgtgaccgaaaggctgtcttgccctgattcagccagagccggaatatagtctgccactctgccttctccggtcttttttttcgcttcttgaacgaatgcgtccagctcctggtaatgccggcataccatttcgatcccctcacttcgctgccgttgtttacatctaatttgcgacgcaaagtgacaattcatgcgaaaacttttatactttaagtaaaggggggcttcaccatgagcgttattcaagtaaaaggcaatgttacatacccgattacaattgatccgagtgtctggattttcgatgaccgcaagtttccgtttgaaaacaatcagcccgttcattcagacgtctctgcagaaacccaggagcatacgcttgatccggaacgggtgattagagaagggcgcatttcgccgccgactttaaaaagcgaaaaacgttatgaaaaagaaagattaatgaacggcagcttcgccatgaagctcggcgctgttttagcaaatgccgagccgaaagaaagcgctgtcctgtgcgtatttatttcagaatctgaaagaaccgaggtgccgcttgaaaaggcgatggacgcaatcgcccacttcagcgatgcagggaagcctcttcaagacggcggtccggtccatttttacgtggacggcaactttaaaaagccgataacaggcgtcacagaaatcgaagttctataacaaatcggccgcaagctgtgcaaggccggatctttcgcctttcacaagcttcacgctgccggagacggtttgtcctttaaaccgctctacgacgtaagcaagtccgttgtttaaactgtctaaatatgggtgatctatttgctccggatcgcccatcaagacaattttgctgccttctccaacccgtgttaaaagcgttttgacctcgtgcctcgtcaaattctgagcctcatcaataataataaactgatccggaatgcttcgcccccgaatgtatgtcagagcctcgacctgaattgatccgatgcctgctaaaatcgcttcaagttcacccggctttttcgcattgaacaaaaattcaagattatcaaagatcggctgcatccacggcttgagcttttcctctttttcgcccggcaaatatccgatatccttccccaccggaacgatgggacgcgcgacaatcagttttttataaataccgagatcctccgtctgcaaaagccccgcagcgagagcaagcaaggtttttcccgttcccgcttttccgatcagggtgacaagcgggatatcttccctcagcagaagttcaagcgccattgtctgctggacgttcttcggcctgatcccccatacatgctcatcatcaaagacgagtctttttacgttctctcctttcttatctgtcataccgaccgcagacgaagatcctcctaattcatctttcatcagcataaactgattcggataaacctgatgctgctgaagctccttgactgaaatttgtttgtttttataaaacgaggcaaaccgctctttattcataaatacatctttgtacccgctatatatctcatcatggtcaacgactctgtcgtttaaaaagtcctctgccaaaagtccgatggcatccgcctttaccctgacaagcacatccttgctgaccagaatgacgaggcggccgttttctttcgtttcctcctcaaggcttaaattctttgccaccgccaaaatgcggttatcattcgttttttcaataaaaatttcctgaagctgatgaaatgaccggtggttcagttcaattctgagcgttcctccgctttccagcggaaccttttcgtgcagccttcctttctccctgagcccgtctatcagcttagatacgtgcctcgcatttctcccgacctcgtccatataccgcttttttgaatcgacctcttccagcacgacggcagggatgacaacttcgttttcttcaaaggaaaaaatggcgttaggatcctgcaaaagtacattcgtatctaacacataaattttactcaagtctcagcctcctgaaataaggatcatcgtatgcttcttttcgtgaaaaacggggatgcctgctaaaatatatgatttggtgcataaagatagaaggttaattcaacaataaaataaatgaaagcattcaaggagggaatctgacgtgcgaattcttttcattatcatacaagcgttgtttattctgaccggctgtaccgctgtacaggacagccgtgaacgcaatatccggaacgaatcgaccgatcagcgcgaagcaaaaccgattcatgtaaaaaatacagctcctgagacagctgaaaatcccggtcggacggatatcgcaaagcatctcgtcgaggtaaccgaaaaaatccccggcattacagatgccaccgcggttgtacttgggagatactccgttgtcgggatcgatgtggatgacaatttagaaaggagcaaagtggaaagcattaaatacaccgttgcccaggcgttaaaaaatgatccttacggcgccaatgccgttgtcgtggctgatcctgatacagtttcccgcctgaggggcatggctagtgatattaaggccggccggcccgtttcaggcattttggacgaacttgctgcaatcgtcggacgcgttatgccggaagtcccgaatgatgtgaccgacaatgaaaaagaatcaccgactaaatcgaatgatgaccagctgaacgaaagagatcagaagaagctgcaaaacgaacagaacgatcaatcagatcatcatatgaaaaaccgccagtaaaaaacagcgcccttcctttggagcgggcgctgctttctttccctttggcagacgggtcatccatgatataatgcttgtcatagtgaaagaggtgaaaactcaatgagagtaaaatgttccatttgcgacaaaattgaacaaattgatgatgaaacactgacagccaaacgcctccgcaatcgtccgattcatacatatatgtgccaagaatgccatgaccgaatcaaagtcaaaacagaggcgcggctgaataccggacacttctcctttcatccagggcaaaaaacgaaaaaagataaaataaaaaaatgacccgccgaaaggcaaggtcattttttttattgcggtttagctgactggttctttttggactggtgcagacggattttgtaaatgatcaaaatcaaggcagcgacaaccagaccttctccgaccggcagaaacacaccgaaaaaagtcagcacggtgcagccgagcatgagaaagagataaactgccgcagcctttaaaaccggcagccgtttggcaaagccgagtttaaatacaatcaccgaaagcacgacgatcgttccgtataacagccacattccagtcagcggatgctcatccacttggtaaagagcagcaaagaacgacagccgttcacttacttcattcaaaaagatccccctccccttttccgttcgggttctatcttttcaaattctgcaagtgattaagacattcctgctgtttttttctttttcgccgctttttcacgttcgtttttgttcaggattttctttcttaaacggatggattccggtgttacttcacagtattcatcctcgtttaagtactcgagtgattcttcaagcgacataatgcgcgctttcttaatcgtagtcgtttggtccttcgttgcggaacggacgtttgtctgctgtttcattttgctgacatttacgacaaggtcattgtcacgattatgttcgccgacaatcatgccttcatatacttctgtgcccggctcaacgaagatgacgccgcggtcttcaataccttgaattccgtaagatgtcgcttttccgttttccatggaaacgagcacaccctgacggcggcctccgacttggcctttttgcatcggctgatagctgtcaaacgtgtggttcaggataccgaaaccgcgtgtcagtgacagaaactcagtagaataaccgatgagtccgcgtgaaggtacggtaaagatcaggcggacctggccgtttccgttattaatcatatcaagcatttcgccttttctcgcacccattgattccataacagaaccggtatgctcttcaggcacgtcaatttgcacgcgctcaacaggctcgcagcttacgccgtcgatttccttaatgataacttcaggtttagacacttgaagctcatagccttcgcggcgcatgttttcaattagaatggacaggtgaagctcaccgcgtcctgaaacaacccatgcgtcaggcgatgcagtcggttcaacacgcagactgacgtctgtttgaagctgcgcgttcagacgctcttcaattttacgggctgtgacatatttgccttcacggcctgcaaacgggctgttgtttacgacaaatgtcatttgaagcgtaggctcatcaatacgcagaaccggcagcggctcatggtggtcagccggacaaaccgtttcaccgacgttgatgtcctccatgccggaaacggcaacgaggtctcccgctctcgcttcttcaatttccacgcgtttcaatccttggaagccgaagattttcgttacgcggaatgatttcaccgttccgtcaagcttcattaatgaaacctgctggccgactttcatcgtaccgcggaaaacgcggccgataccgatacggccgacataatcattgtaatcaagaagcgccacttggaattgaagaggctcttcagcgttgtcaaccggcgcagggacatgttcaagaatcgtttcataaagtgattccatgttttcgtcctgctttttcgggtccagactcgccgttccgttaatcgcggaagcgtacacgacagggaactcaagctgttcctcgtttgcgtcaagctcgatgaacaaatcgagcacttcatcgatgacttcttccggacgggcgaaatcacggtcgattttgtttacaacgacaacaggatttaagttctgctcaagggcttttttcagtacgaaacgggtttgcggcatgcagccttcatatgcgtcaacgactaacagaacgccgtcaaccattttcataatccgttctacctctccgccgaagtcggcgtgtcccggagtgtccaaaatattaatgcgtgtatctttatagttaatcgcagtattcttcgcgagaattgtaataccgcgttcacgttcaagatcgtttgaatccattgcgcgttcggcaatattttcgttggcacggaatgttccggcttggtgaagcaattggtctaccaaagtcgttttcccatggtcaacgtgggcaataatcgcgatattgcgaagatcgtttcgaagtttcacattttcatctcctaaaaaaattagataactttcatattataccacacatcctctttaaaagcgtcacgtttttctgtaaactgaaagtatgacgttaaaggggatggaaatatgaaaaaattgaattggctcttattattatttgcattcgcagcagtcttcagcatgatgctgatcggcgtatcaatcgctgaaaaaagcgcatggggcatcatcggaagcattgttctcgttatcgccatgatgggaagcggtttcaccgtaaagaaaaaaatgcgcgaacagggactgcttgattaaaagcatgaccctttgcaaaattccgtaaacatgaaaaagcacaatgccttacgaagcctgaatcttgattcaggcttttttgttatctcaaaacagactgagaattaaggcttctctcccccgccgcctagtcaggaagccggaaatggcggcatgccttctagttacaacagcagagttcctcagaaagtgcggtctgaaatagtccggcatcgttatgcagaaaataccataactcctatttcaattccaacattgtatttttatacttggattgtaagcaaatacacatgacaaggagagaacgaaatgaacacatcttttttgaaaaaaaccgctgtaactgccgccgcaaccgcttcagccgccttgcttgcattcagcccgcttgactctgccggcgcaaaaacgattcagtcaaatgaaccgcatgtgctgcaggcttccgctgagaaaacaccggaagacgcggcaaagctgcttgacatcatcaaccaatcgatttacgaaaaagacggagtctattattttgacggtgacaaagcggttgaattgggattaggtcaagaagaagcacagatcattcaaaagctgtgggacagctcagccgaatttttaaccgtactttcccaatgtattgagaaaacagatggcgaatatacatttaataaagaaaaagcaattgagcttggttttacggaaaaagaggccgttatcgttgatcagctgttcaatactttctcccagagtcttcatatccttcaatctgcgctggttgaagatgacggtgtgtatacatttgatcaggaactggcagaaaaagcgggtgcaggcaaaaaagaagcagagctgtttgccggattcattaattcactgccccaagaattgcttgaaggcatttatacagcctttcacccggctgagtaaatggaaaaaacgcccggtcattcagccgggcgttttttaaatcagcaatttaagggccagcatgatgagaaatacagcgccgaacaagcaggcggcttttgtcagcagcctcccgtaataccgttcccggaagcgtctttcttcctcttcataacaggcggacgccttcatctccgcactgcctaagtcaagcggctccttcatcatatgatataaacttccgcactcactgcatgctttaagatggcgggaaatataccgctccgtttctgtttcacaatcgccttcaatatataaagggagtaaatctctcactaaacagcaagtcatattaatacagcccgaagcagaatcccggcataaaaccaaactctctcacggctgattttcggatggaaatttagcgcgtataaaacagcaaggcagacggatgaccactgaatgaccaacacactctgtctgcttaaaatgaaatatctgtcgaaatgctgaataaaatgactgaaaatctctgacatctgtaacaatcctttacgtttattaaggcctcacccgtttagacaaccggcattcaaaaaagttttaaagatcttaacatttttcccctatcatttttcccgtcttcatttgtcattttttccagaaaaaatcgcgtcattcgactcatgtctaatccaacacgtgtctctcggcttatcccctgacaccgcccgccgacagcccgcatgggacgattctatcaattcagccgcggagtctagttttatattgcagaatgcgagattgctggtttattataacaatataagttttcattattttcaaaaagggggatttattgtgggtttaggtaagaaattgtctgttgctgtcgccgcttcctttatgagtttaaccatcagtctgccgggtgttcaggccgctgagaatcctcagcttaaagaaaacctgacgaattttgtaccgaagcattctttggtgcaatcagaattgccttctgtcagtgacaaagctatcaagcaatacttgaaacaaaacggcaaagtctttaaaggcaatccttctgaaagattgaagctgattgaccaaacgaccgatgatctcggctacaagcacttccgttatgtgcctgtcgtaaacggtgtgcctgtgaaagactctcaagtcattattcacgtcgataaatccaacaacgtctatgcgattaacggtgaattaaacaacgatgtttccgccaaaacggcaaacagcaaaaaattatctgcaaatcaggcgctggatcatgcttataaagcgatcggcaaatcacctgaagccgtttctaacggaaccgttgcaaacaaaaacaaagccgagctgaaagcagcagccacaaaagacggcaaataccgcctcgcctatgatgtaaccatccgctacatcgaaccggaacctgcaaactgggaagtaaccgttgatgcggaaacaggaaaaatcctgaaaaagcaaaacaaagtggagcatgccgccacaaccggaacaggtacgactcttaaaggaaaaacggtctcattaaatatttcttctgaaagcggcaaatatgtgctgcgcgatctttctaaacctaccggaacacaaattattacgtacgatctgcaaaaccgcgagtataacctgccgggcacactcgtatccagcaccacaaaccagtttacaacttcttctcagcgcgctgccgttgatgcgcattacaacctcggcaaagtgtatgattatttctatcagaagtttaatcgcaacagctacgacaataaaggcggcaagatcgtatcctccgttcattacggcagcagatacaataacgcagcctggatcggcgaccaaatgatttacggtgacggcgacggttcattcttctcacctctttccggttcaatggacgtaaccgctcatgaaatgacacatggcgttacacaggaaacagccaacctgaactacgaaaatcagccgggcgctttaaacgaatccttctctgatgtattcgggtacttcaacgatactgaggactgggatatcggtgaagatattacggtcagccagccggctctccgcagcttatccaatccgacaaaatacggacagcctgataatttcaaaaattacaaaaaccttccgaacactgatgccggcgactacggcggcgtgcatacaaacagcggaatcccgaacaaagccgcttacaatacgattacaaaaatcggcgtgaacaaagcggagcagatttactatcgtgctctgacggtatacctcactccgtcatcaacttttaaagatgcaaaagccgctttgattcaatctgcgcgggacctttacggctctcaagatgctgcaagcgtagaagctgcctggaatgcagtcggattgtaaacaagaaaagagaccggaaatccggtctcttttttatatctaaaaacatttcacagtggcttcaccatgatcatatatgtcttttcccgatcgtctttttcaagcttcagctgttcaaagccgcactggcttaaaaacaacacccattcctgcctggcaaggggaacggctgtaaacatcgctttatgctccgctctcagccggccggcaatctcttcaatgaccgcgcgcccgattcctttctcttttgcctccggagcgacggccacagttccgagccacggttttccgtttgaaggggcccattccaaatgaaagctgacggcggcaggagtgccgtcaagctcccatacaagccacgttccattgtacatggagtacgcaagcataaactccgccgcatttttcgttccgaattcttcggctttccacaccgggtgtgctgccgccagctgctccataaatccaagatcctcttcttcaaactccctatctgtcagcatgtaaatagtcgccaaaaatgattttatgtatcgccggattgcccgcaagcacgctgtggttttctaaaaacgtaaacggctcaccgtctgtggtcgtgtaaatacctccgacttcgttcaggagcacacagccggcagcataatcccacggcgcaagcctcatcgtgatgtatgcgtcaatgcgtccggtcgcaacactggccagctcaagtgccgccgagccgtaggagcgcgttcctctcacccgtttcacgagcggcgccaaaatactcggatcaattcttcggttttccgttacccatgtggcattgattgcaataatcgcttcttcaatggaagcctcttttaaaggagcaagcggcgtgtcattcagataagccccttttccgctgaatgcgtgatacagttcgtcctgcattacatcataaattaagccgattttgccttttccgtcttcaaaaatgccgatggagatcgcgaaatgccgcttttgatggacaaaattcattgttccgtcaatcggatcaatgatccagacgattccgtcaagagagcggagtttatccccctgtccttcttctccgaggatgcggtgtccgggaaaagttccctgtatacggtcaatgaaaaagcgttccgtctctttatcaatatttgtgactaaatcattcggatttgattttgtttcaatcgtcaagctttcctgcatggattgtctgattctcgctccggcttcttttacccactgttttgcgatttcatcaatttccgtccaatttgtcataccgtgtacctcttttctatgtatagcttactctatagcatactgataaagacgattaaaaagcaaggaaaatgaaaaaaatgccttctcacgtaaaaacgaaccatttcttgcggttcgtttttactattctttatccgttaagacgaatccattcttttctgagacgttccagttttcttttgctgagatcgatttgatcttcattctctttttgcatggcctcatacagggttgccaattcataatcaacctctagtctccagacagctacacggttatttttttcctctctgaatccttccttcaccacttgcctcattgtctttcgccccttccagagatcatttgttaaaaaagcatcccattttccaattttccaaatcatttatgatacttcttatatcgtatggaaacttatattcggctgtaacaacattcttaaaattgtgtgtttacctattcgttttttaccaccgatcctctctgctgaaacgttctcaatgtttttgcggccggcggcggctgtggtaaaatatgaatacttacgataaggaggaaaaagatgactcagatgcgttttacaaaagaagactttgacacatttacaatagaaggtttagatccgcgcatggaggtattaaaagaacaagtccggccgaagctgaccctgttaggagagcatttcgcaccgacattgtcggcattgaccggagatgaaatgttcccgcatgtcgccaagcacgcaagaagatctgtcaacccgcctgctgacagctgggttgcctttgccaacagcaaacgcggctataagaagctcccccactttcagatcggattatgggacacccatatgtttgtatggtttgccatcatttatgaatctccgataaaagaggaatacggcagattgctggaggcgaagcaggaggaaatcacaaaacagattcccggtcattttgtatggtcgccggatcatacgaagcccggggcgtacaagcagtccgacatggatcaggaacagctgaaaacattgtttgaacgcctgcagacagtaaaaaaagcagagcttttgtgcggcatccagcttcaaaaagaagacgtgatcaacatgaacaacaatgaattcctgcaaaccattgaagatgcttttagaaagctttcctttttatacacactgactcagaaagtctcataacataaaaagcgggccgattgacggctcgctttgtttacattttaataaccgcttgatctgattgttttgcctgtttcacagtccggtacggagaataggtgctgtcagcttcaaatcggctgcagattttcttttcttccgcttttccgggaacgatttctttaaagcggcggtacgcattcagaagtctgtctcggtcagctcctttttcataggcgttttcaacctgctgaaaaaaagcaatgacatccacggcctcctctgtcgtccagtcctcattcatcggatattgatattccaaatgtcttcactcctttatattcctgctcaaaataagcatcttccatagatcataaattgttctttacattctttcaagttcataatataattcatttgttttacgtttaaaaaacgggtaataaattgaatgtaatacaaactaatccgtaggtattatgataaaggtgggaaaacaattgccgcaacatgaaacacccctgtacagcggactgaaaaagcacgcggacagacagcctgtccagttccacattccgggccataaaaaaggcgcgggaatggatccggaattcagacaatttatcggagaaaacgcgttaagcatagatttaattaatattgaacctctggatgatttacatgcgccaaagggcatcattaaagaagcgcaggaactggccgctgaagcattcggcgcagaccacaccttcttttccgttcaagggacgagcggggccataatgacgatggtaatggccgtatgcggacctggagataaaatcatcattccgagaaacgtccataaatccattatgacggccattgtattttccggagcggtgccgatttttatacatccggaaatcgacgatgaactcggaatttctcacggcatcacgcttgaatctgccgagcgggcattgactgagcatcctgacgcaaaagggcttctagtcataaacccgacgtatttcggtgtggcggctgacctgagcagcattgtcaagctcgcgcattctttcaatgtacctgttcttgtcgatgaagcgcacggcgtgcatattcattttcatgataagcttcctctgtccgccatgcaggcgggcgcagatatggcagccacaagcgtgcacaaattgggaggctctctgacccagagctccattttaaatgtgagagaaggccttgtatccaaagaaagagtgcagtcgattctaagtatgctgacgacaacgtcaacatcctatctgcttctcgcttcacttgatgtcgcaagaaaacggctcgctacagaaggccgcgggcttcttgaagatacgatcctgctggcgaatcagacacgggaacgtctcaatcaaattgaaggcatccgctgtgtcggcgaagagatcacagggtctaaagctgccttcagttatgatccgactaaattaatcatttcggtcaaaaacctcggcctgaccggtcatgacgttgaaaaatggcttcgcgaatcatataatatcgaagtcgagctgtccgatctgtataacatcttatgtattttcacacccggagacagagccggggatgccgaccgtcttgtaagcgcgcttacagacatttcaaagcaggcttctgccaatgagtacgctcaccggcagacggaagttttgcttcctgaaattcctctgttagcgatgacgccaagagacgcattttacgcaaatacggaagtcatcccgttaaaagaatccgcgggacggatcattgcagagtttgttatggtgtacccgccgggaattccgatctttattccgggcgaaatcattacggaagaaaatatcagctacattttcaaaaatctggacgccggccttcccgtgcagggtccggaagacgcaacgcttaacatgatcagagtcatcaaagagcaaaaagccatccaataaacataaagaagcccgaaaccaaatcgtttcgggcctttttacgccgttttactcttcttcaagatgacactggcattgtccgcagcatgttccgtataacgtcgttaccttctcatcctcgaagtaatgaatcgcttcgttacagtcttggcaaacaatcgtacccatctctcattccccatttctcagaatttgaaaacgcttaattttcacttgttgttattatattattatgtcacatttaatatgtcaactgataaattgtataacacatttattttttacggtctttttatttcccgaggatcaatcacggtatatcctttattacgcaatccttttacaatgtccggtatggcttcagccgtccattttcggtcatgcattaatatgttggcgccgtccttcagataagggctgctcagcgttatatcggtaagcgcttttttggattgatatttctgctcccaatcatagccgaaggtccagttcattttcatcataccttctttttgtatgagtttgtcactgtagtccgtattgcttccgaaaggcgccctgaaaaatgccggtttttccccgattaccttctcaaccgctttattaacaccgatgatttcttcccgttgtttttgttcggaaaggtctttcaaatcttgatgagtcattgtatgatttccgaccataaaccctaactcatgaatatgcttaagcgctttcttgttttcatcttttttcaaaaattgaccgtttacaaaaaagatcgctgacgcatggagatcatgcagtttgtccgcaatctcagcggcatgctgatcaggtgcatcatctatcgttaacaatgcgatcggttttttgtctttttggtcatccagtttttccacggcaaaggatttcgggttgatatagtaacggggctctgccttctgttttttctgcttttcctcttttgtatgatcgttttcctgtttggcatgatcgaccgcggcttgagaatggggccgattgtttgtttgcgtcttttcatttgattggcagccgacgaggaagcacatacacatgactgctgcagcggctttatacattggcaatccctcctgatggttttgcccacagtataacgaaaaacagcgctctcacgaaaaacaaatgtgcctttgttacacatcggcggccgaagttgtcacacgtattatttcttcattaaaaacggtttcaattatataacaattaagtaacaagccttaggtttttcacctctcgtgatacacttgatatagtccttattaatggatgatccaatatattatataaaacagaggagaaagatagatgcgctaccgtacggtgattcccttttttttgatgctgttcgttctgtcaagctgttcggtttctactgtcagtccattcaaaaataaccggatcgacagcatacatcacactcaaatcttgtttttttccgatgaaaatcatatagataaagaagtcccttactacgacgcgattcttgatttagaaaagaaatatccccatcatgtcgatcaaatgaaggtttatgacaacagaaagggctgggaagaagaaatcaacacgttcccggctttaatggtgatcaatcaccggcatgttgtcatgaagattgaaggcgccgtaaagaaaaaagaggatatcatcaagcccatgcagcatgtgcttgcaaaataaaaacagccccccgctttaaagcggaggctgtttctttgcttattaatgattattttacgatgtggatcgggcttccgattgctacttcggcagcttccattgtgatttcgcccaatgtcgggtgagcgtgaattgtcattgcgatatcttcagcagtcattccgccttcgatcgccaggctcaattcagaaatcatgtcagaagcgcttgcgccggcaatttgcgcaccgatcacaagaccatcttctttacgagtgatcagcttcatgaagccgtcagtttcgttaagagacagcgcgcgtccgtttgctgcaaacgggaatttggcagcaacgacttcaatgccttcttctttcgcctgtgcttcagtgtaaccgacagaagccagttcaggctcagagaatacaaccgccggaataccgaggtaatcgatttcagcaggctctcctgcaatagcttccgcagcgattttaccttcgtaagacgctttgtgagccaatggaggtccgtcaatgatgtcaccgattgcgtaaatgttcggtacgtttgtgcggcactgcttgtctgttttaatgacaccgcggtcagtcatttcgataccgacttgctcaagaccgagctcatcagtgttcggacggcgtccgacagtgattaatacgtaatcagcatcaaccgttttttcttcgccttttacttcgaatgtaactgttacgccgtcaggtctttcttcaacgcctttagccatagcgcttgtatgaatttcaacgttgccttttttcttcagtctgcgggtaacaagagaactcatttgtttttcgaagccaggaagaatttcatctccgccttctaaaataaccaattcagttccaaagtttgcatacgctgttccaagctcagtaccgatgtatccgccgccgataacaacgagctttttcggaatttctttaagcgccagtgcgcctgtagagttcagaacgcgttcgctatatttgaagtttggcaattcgatagggcgagaaccggtagcaatgatcgcgtttttaaatgtatatgtttgcgcagagttctcatccattacgcggacagagttgctgtctacgaaataagcttcgccttttacaacttcgactttatttccttttaaaagacctgcaacaccgccagtaagcttatttacaacagaagctttccattcttggacttttgtaaagtcaacttttacgttctcagcagtgattcccatgtcatctgaatgttttgcattctcgtaacgatggcctgcattgataagcgcttttgaaggaatacagccgacgttcagacaaacgccaccaagagttcctttttcaacgactgttactttttgtccaagctgagcagcgcggatggcagctacatagccgccaggtcccgcaccaatcacaagagtatctgtttcaatagggaaatctcctactaccataacattacgcctccattaaaataagttgtggatcgttcagtaaacgcttgatgtggtttaacgcattttgtgcagttgctccgtcaatcatacggtggtcaaagctgagagaaagagctaagacaggagcagctacaatttcaccgtcgcggacgatcgctttttcagcgatgcggccgataccgagaatcgcaacctctgggtggttgataaccggtgtgaaccattggcctccggcagaaccgatatttgtgattgtgcaagaagcgcctttcatttccgcaggtgcaagcttgccttcacgcgcttttgtagcaaggctgttgatttcatcagagatttcgaaaacggctttacggtcggcatttttcactactggcacaagcaagcctttttcagtatccgctgcaattccgatgttgaaataatgtttttggatcacttcatctgttttatcatcaatagatgtgtttaaaacagggaattttttcagagcagatgttaatgcttttacgacgtaaggcaggtaagtcagcttgatgccttgatcagcagcaacttgtttgaactgtttgcggtgagcaacaagatttgttacgtcaacttcatccataagagttacgtgcggtgcagtatgcttagagttcaccattgctttagcaatcgctttacggataccgctcattttttcgcgtgtttcagggaattcgccttcaggagcttgagctgctgcaggtttagctgtttcctgaggtgctgctgttttttgcggtgccgcttcttgagccgctcctccgtttacaaagctgtcgatatcttcttttacaacacgtccgttatttcctgaacctgtaactttgcggatatcaacgcctttttcacgggcatatttgcgtacggaaggcatagcgatcacgcgtttgttcggatcagcttccgcttggtcctgctgtcctgcgccggtttcttttgcaggctctgctgcgcgttcttctttcgctacgtcctgtcctgcttcagctgaagactgaacttgcgcttcagttttcgcatcgccggattcgtcgcttcctttaaattgaagatcttcgtaaccaggtgcgtcaaacgtaataatcgtttgtccaacagttgcaaccgttccctcttcaacttttaattctaatacttttcctttaacaggtgaaggaatttctaccactgctttatcattttgcacttcagccagtacatcgtcttcttctacctcgtcgtttggcttaacaaaccattttacgatttcgccttcgtggataccttccccgatatccggaagtttaaattcaaatgccacagttttcgacctcctagttgattaagcaaattttagttatgcatacgcaagcattgaacctctaaaacaggttttttaatagaggaaaagaacgtgtcttttcctcctgttatgaagcctgattaaaattcaagaacttttttcgcagtttcaagaacgtctttatggtttggaagccatacgctctcagcttgcgagaaaggaaatactgtatcaggcgctgcgacacgcagtaccggagcttccaggctcaggatcgcgcggtcgttgatttcagcaacaacgttggcgccgacacctgcttgtttttgagcctcttgaacgacaattgcgcggcctgttttttcaacagaagcaataattgtgtcgatatcaagcgggcttacagtgcgaaggtcgataacttcagcagaaacgccttctttttcaagctcttcggcagctttaagcgactcatgaaccatcgctccgtatgtgatgatagaaaggtcagtaccttcgcgtttcacatcagctttgccaagctcgattgtgtattcttcctcaggaacttcctgacggaaagaacggtaaagtttcatatgctctaagaaaacgacagggtcgttgtcacgaattgcagaaattaaaagtccttttgcgtcatacggagtagacggaataacgactttaatacccggctgctgagctacaaggccttctaagctgtcagcgtgaagttcaggagtgtgaacaccgccgccgaatggagagcggattgttacaggtgaagtccagcgtccgccagaacggtagcgcatacgggccatttgaccagaaactgaatccattacttcataaacaaatccgaagaattggatttccattaccggacggaaaccgtttaagcctaaaccaagggcaagaccgccgataccagattcagcaagcggtgtgtcaaacacacggtcttcaccgaattctttttgcaatccttctgtcgcacggaatacgccgccgttcacaccaacgtcttctccgaaaactaagacattttcgtcatttttcagttctgtgcgtaacgcatccgtgattgcttgaatcattgtcatttgcgccatggcttacttcgactccttctgtgtataagtttctaattgctcttttaggttgtaaggcaattcttcgtgcatgattttgattaaatcagtcactttttgtttcggttctgcatctgcttttttgatggcctgcttaatttcttcttttgcagcctcaattactttgctttcttcttcttcagaccacaggcctttgttttcaaggaaagcgcggaaacgtacgagcggatctttctgctcccattcgttttcgatttctttcgtacggtattttgtcggatcgtcaccggccattgtgtgcggaccgtaacggaacgtaagtgtttcgatcagtgtcggaccttcgccgttgattgcgcgttcgcgtgcttcagcagttgcagcgtacaccgcaagagcatccataccgtcaacctgaacgccgacaatacctgctgccgctgctttttgagcgatcgtttgagccgctgattgtttttcaacaggtgttgaaatcgcatagcggttgttttgcactacgaagattgcaggtgctttgtaagctccggcaaagttgattccttcgtagaagtccccttgagaggcgccgccgtcacctgtgtaagtgatagctacggcttttttgccccgttttttaagaccaagcgccacaccggcagtttggatgtattgagcaccgataatgatttgcggagaaagggcgttcacatcatcaggcatttggtttccgcggaagtgtccgcgagagaataagaacgcttggtaaagcggcagaccgtgccagattaattgcggcacatcacggtagcccggaagaacgaaatcttctttttcaagcgcgaaatgcgttgcgatttgtgaagcttcctggccggcagtaggagcgtagaaaccgagacgtccctgacggtttaatgaaatagagcgctgatcaagcacgcgtgtgtataccatgcggcgcataagctcttttaattgatcatctgttaaatcaggcatcgccgcttcattcacgacttctcccttttcatttaaaatttggaacgtttcgaactgcttcttaatggcatcaaattgcttcttactgtcaacgattgtttttttcgtttttgcagccatactaaagtcacctcttcctttcttttaaacagtcattagacgtgcattcctttatacatacaaacttaggataccctaaagtattagcagcaagtcgtatatatttagcctatccccagtttgccgaaacctttatgtaggatcatcactatctgatctgaactgtattattgcggagttgtaaatgactgatacaacaccgcttgacatggattagtttacaccaaataaagaagacccgtcaatcgttttggatgttgattttaaataaatgtattcgctttaaatttttccgtcggaacaagctgtccatcagacgcaaactgtactagtatacatacactcactgtactacaatagaattgcatatccgttttttggcatcaaaaaaggtgccgggtacccggcaccttccatcattttcagttttcattgacatgaaagccagcctctttatacagttcttctctggcctgattatactcttttgtctgcttgttaaacgccccagcctgctttaacacctttttgtaggaatcgtttactttgctgatctgcttgtcaaggtcttctgctgttaagtcttttttcttaatgatgctgtacaattctttatcatattgaatggctttcatatagtctttatagagtgcgccgtataagtcatagcgtttttccatatgtgcggcagctgcttttgcctttttcttaatggattgatctttaatcgagccggctgtttgggtgacggcttcaaattctttttctgaattgtctatactgtctttttccgtttttaaatgctgcttgcgctgttccgtgtttttaagggcctcgtctgaaagtgaaacgattttggcgtaatcgttcatattgagctgaatcacttcgttatacagctcatcttcttttttctccaatttttctaacgttttctgctccttttgaaacggtttttccgcttgtacggctttttccatcgaatcatgaagcgtttcaaccggatcttttcccccgcagcctgcaagcagcatacttgcggcgccgagcgctccgattcccgctaacacttttttttgtatcatgttcacttaaaatcccccaatcttgacaatttccactatagaagcccggacgccgtttgacaatagctgagctgtaattggtagtcccggaatcttctgggtaaagacgattatggcgctgtcagagaatacttgcgtaaaaaattgagaaaacagggcggatgaccatacatctttccggcttttacatagtttatagtagacgccggccctgctgataaagggtcagcgtaattaaaagaggagggtttatttatgtacggatatggatacggatttggcggcggttgctgcggaggcggtttcggaggtggatacggttacggcggcggttacggatacggctgcggaggcggatacggccgcacgttcgcattaatcgtagtattgtttatcttattaatcatcgtcggtgcagcttatttaggctgcggctgctgaactggcaccccataaacatcggccagcctcctatggctggccaattgtttcattgcgctgcgataaagaaattcgctataatttacatattaagctttaggagtgaagtttcttgattactatggaaaatattgtccgtgacggacatcccgcgctcagagagatcgctgaagaggttcagcttcccgcttctgatgaagaaaaacagcaacttgctgatatgattgagtttgtgaaaaacagtcaaaatcctgaattagccgagaaatacgagcttcgtcccggtgtcggtcttgccgctccgcaaacagccgtaaaaaaacggatgatcgccgttcatgcagaagatgcgaaaggcactttatacagctatgctctttttaaccctaagatcgtcagccactcagtagaaaaaagctacttgacgagcggagaaggctgcctgtcggtagacgaacccatccctggctatgtgcctcgctacgcccgcatccgcgtaaaggcgacgacgcttgaaggtgaacagattgacattcgtctcaaaggttttccggcgattgtgtttcagcacgaaatcgaccatctgaacggcgttatgttttacgatcatatcgataaagaaaatccgtttaaagaacctgaaaacgctattgccattgaccgttaaaaaaaccggcacttctcaaagtgccggttttctttatttcagaaggcccagttctttgacagcccagctgattccttcttcatccaccgattttgtgacgaaatcagcggcagcctttaattctggaactgcatttcccatcgccacgccggtgccgacaaaactgatcatctcaagatcattcagtccgtcgccgaaggcataagtgtcgcttatgtcgtacggaagccgctcaagcactcttttaatgccctccgcttttgaaccgcccttcggaagcacgtccgttgacagttcatgccagcggacataatcaaactccggaaaagcggcatacgctttttcttcatgtccgcggcagaataaaaggagctgataaatttctttccctttataaaatgtttcatcaacctcgggataaggggctttcagactgccgattccttcggtgacgtgcggatgcccggggacggtcgtcttcatcgtgtcttccgccataaatacaacggggtgctccccttctgacgcctgctttaataaacgcgcgaccgcatcttccggaagcgggtttttataaatgacttctccttcaaacaccacaaactggccgttgtatgagataaatgactcgatctcaagctcttccagaatcggtctaaccataaacggagaccttccgctggcgataaaaacatgatggccggcctctttaagcgccgccacggcgcttcttgtactatcagggatatgtttatcatggtcatagatcgtgccgtcaatatcaaaaaagatcagttttggtttcatatcgatttctcctttatcccgtttatcagtcgtgtctttttcaatatcatcatacagaaagtttttcttccggcaaaccgccttgacgaaattccaattttacccacgaaaacaaattctgtttttccgcatactactgctataagggcttcaaaggaggaatacgatgctgcgccgtttacggaagaaactcagaagacagtggggcggaatgctccgaaaaaaagtcatcgcgtaaagggatctttcggtttttgaaagtcccttttttgctcgagactttccttataatccgttttcgaatataatagaataagcgagtctaacatacggcatttaaggagagatttggatgatttataaggtattttatcaagagaaggctgacgaagtacctgttcgggaaaaaacagattcactttacattgagggcgtttcagaacgggacgtcagaacgaaactgaaagataagaaattcaacattgaatttgttcagcctgtggacggtgcttttttagaatatgagaagcagagcgaaaattttaaagtattggagttatgagcggaatgaaatttgtaaaaaatgaccagactgccgttttcgccctcggcggattgggcgagatcgggaaaaatacgtatggggtgcagtttcaggatgaaattgtactgattgatgcgggaatcaagtttcctgaagatgaacttctcggcattgattacgtaatccctgattacacgtatttagtaaaaaacgaagataaaattaaaggtctgtttatcacccacggtcacgaagaccatatcggcggtattccgtacctgctcagacaagtaaatattcccgtttacggcggtaaactcgcgatcggcttacttcggaataaacttgaagagcacgggctgttaagacagaccaaattaaacatcatcggtgaagatgacatcgttaagttccggaagacgtctgtatccttcttcagaacgacacacagcattccggattcatacggaatcgtcgtcaaaacaccgccaggcaatatcgtacataccggggactttaagttcgactttacaccggtaggcgaaccggcaaacctgacaaagatggccgaaatcgggaaagaaggcgtcttgtgcctgctttctgacagtacaaacagtgaggtgcccgatttcaccatgtcagaacgccgcgtaggcgaaagcattcacgatattttccgaaaagtggacggcagaattatatttgcgacatttgcttcgaacatacaccggcttcagcaggtgattgaagcagccgttttaaacggcagaaaagttgccgtattcggacgcagcatggaatcggctattgaaatcggacaaactctcgggtacatcagctgtcctaaaaatacgtttattgagcataacgaaatcaatcgtatgcctgccaataaagtaacgattttatgtacgggaagccagggtgaaccgatggcggcgttatcacgcatcgctaacggcacgcaccgtcagatatccattaaccccggagatacggtcgtcttttcttcctctccgattcccggaaacacaatcagcgtaagccgcaccatcaaccagttataccgtgcgggcgctgaagtcattcacggttcattgaatgacattcatacatccggacacggcggacaggaagaacagaaattaatgctccgcctgatcaaaccgaagttcttcatgccgattcacggggagtacagaatgcagaaaatgcacgtcaaactcgcgactgattgcggcatacctgaagaaaactgcttcatcatggacaatggcgaagtgctcgcgctcaaaggagaagaagccgctgttgcaggcaaaattccgtccggctccgtttacattgacggaagcggaatcggtgatatcggcaatatcgtgctccgcgaccgccgcattctttcagaagaaggccttgttatcgttgttgtcagcatcaatatggatgactttaaggtatcagcaggacctgatttaatttcaagaggttttgtatacatgagagaatccggtgatttaatcaacgacgcgcagcagctcatttcgaaccatctggagaaagtaatggatcggaaaacaacgcagtggtccgaaattaaaaacgaaatcaccgacacgcttgctccgttcctatacgaaaaaacaaaacgccgcccgatgatccttccgatcattatggaggtctaaaataaaaaaactgcactcatcacgagtgcagtttttttattgaagcggaatatgctgaaaggccttaacatcaaacagacccgctgccgtcattttaatgtccggaatgacgggaagcgctaaaaacgataatgtgagaaacgggttgaaatcaccggtgaatccgagcagaggaagcttttcatgaagcacgcccaaactgtcattcacccattccgcggacttatcagacaaaagcccggcgatcggaagcggaacagagtgaagcaattctccgtttttcacggctgttaaccctcccccggtgtcacggagcctgttgattgctcttgccaaatcggcatcgtttgtaccgacagcgatgatattgtgggaatcgtgagaaatggttgtggcaatggcgccttcttttaacccgaatccttgtacaattccgagccctatcattttttctccgctgtgccgctctgcgacggcgatttttaataaatcattttgtgtatcagaacaaaatgcgtcagcagatggcgcaggcacttcttttttcctcgtttccaaatgattcggtatgatttcgattacattcatttgcctgccctcttgaatcggcatatgaaaatcagattcagtgagcggcgctttcagccgcactgtatccaacagcgcctgatccggagaataagagccggcagactgttcataaaccgtgcgtccgttctcggcaacggtccgtccggcgaccatggtcttcgtgacggcagcctcccgcaaatctgaaataaacagcagatctgcgtcaaaacccggcgcaaccgccccttttgtttcaaggtcgtagcactcggccgcatttaagctggcgagctgatacgcaaggaatggatcaagtcccgcctttatcgccattttgacttggtggttcacacttccttctgaaagcagatcgtctacatgtttatcatccgtacaaaagaaaaagcgccgtgcatttttttcattcaccgccggcagcacattgagcgtatttttagccaccgatccttcgcgcagcatgacatacattccccgtctgattctgtccagcgcctcggcttttgtcgtcacttcatgatcatttgacaccgatgcggtcctgtatatattgatgatatctgaagacagtccggctaaatgcccgtcaatccgctttccgtgatgcttggcatcaagcagtttctcaagcatatcctcttcgccttccgcaacagacacataatccataacttccgcaagccccagcacctctttttcctgataaaaaggctttaaatctgcggcttttaatacagctcctgagcgttcaaagcttgccgcgggaacacaggaaggaagcatgaaacgaatgttcagaggcgcttttttcgcctgctctatcataaatgaaatgccttttgccccggaaacgttcgcaatttcgtgaggatcagtaatgacagtagtcactccgtgggggaggacggcttttgcaaattcaatcggagtaaccatagaggactcgatatgaacatgtccgtcaataaagcccggaacgatcatttgaccttctgcatcaatgacttctttcccttcatactcgcccaatccgacaatcactccgtccgtaatggcgatatctgcagaaatccattcctggttaaatacatccatgatttttccgtttttaatgacggtatcggctttttgtctgccggctgatgcattcagccgttcagccagtgtttctttgttcaaaatgaggcctcctctttttctttatatggtacaatatgctatcggatcgcctgatcatagtcaataaaaactgcagaaaataccgcttacacgataaatgtctttctattctgacatataaaaaagaccgtccttttacggacggcttttcactttgtatgaagcactcttttttcgaatcgggaaatatccgtaagagagccgataacgatgagaatatcttctttttggatcatttcagtcgccagcggagatacgatcacttctttttctctcttgatggccacgatattaatgccgtacttcgcccggatgtccagatcaagcagtgtgttacccgcaagcctgctgttggccacgatctccacaatgctgtgttcgtcggacagctctaaataatcaagcacattatttgatacgatgttatgggcgatgcgctttgccatgtctcgctcagggtggacgatgtgatcagccccgattttcgcaagcactttttcatgataatcgttctgcgctttgaccgtgattgtgttaacgccgagttcctttaagatcagcgtcgttaaaatgctcgcctgtatattttcgccgattgccacaatgacgtggtcaaagttgcgcagccctaagtttttcagcaccgattcatcggttgaatctccgatgactgcgtgtgatgcgattttggcatattcatttactttatcttcatcaatatccatcgccatgacctcaaggccttcttcacttaacgctttgcaaatacttccgccaaagcgcccgaggccgatgacggcaaactcttttctcataacagtgctcctttaaacaatatctctactaggaatagtatcacattttcggcaatgagttcatatagcgtttgagcttttctgaaaaggcgggcgataaatacaagtcggctccgcgttcgatttcttcctggtagtgacccggaggcgcgatttcctctgccttatcaagcactagaaacgtcaggcagcctctgtatacgcggccgccggcacatacttctatgaacgcgggacggtatgtatggttatcaacaccttctcttttgtacaggtaagttgccgcttcaaacgggagcttgtacagcacgccttcagtccgtcccccgtcttcaacaagatcggctctcgaaccgtcaggacgccttaacgtgaatctcgtggaatacccttcaacaaccgcacctccgacaggctcggcaaaaaagtgatcgacccccgcctgtttaaaccgggcattatccatacaggacccgtaagcgaaataataaaccgggctgtcatcctcccgtttcataaaacgatattctttccagtctccgcttttgatccggctgaatgaggcacactgttccggctttaggacatatgcgaaggcggttttattcccgacatccgtcgtcacggcgacttccttccggtcaaaatcggcataatgcgcatccagcttacggatcatctgatgatctgtttcatacaattccccgtacacaaaagctgtttctgctaaagacgccgcaggctgacctttatctgttttatacaggacgccgtttatcgcggcctgctcgcacacacacggagcgcctttcagcagctcatgtttctcttcacgcttccgtaacaaaccgtatacaaaaagaagcaagttatttttcctccttttggacagcagccgcttctaacggcagaatcacctgaaacgtactgccttctccatttttgctcttaatgttaagtttaccattatgctccttcagaattcgtaaacaaatcggaagtccgaggcctgttccctgatcttttgttgagaaaaatggtttcccgatgttttcaagcttttctttcgacatgccgtttccttcatcctgtatgctgatcaccgcattttcttcatcacgttttgtgtaaatatgaatattcccgccgtcaggcatcgcttcaatcgcatttttaataatattgataaatacctgcttcagctgattttcgtcaccgttgactatacaggactcagtctgcgtgaaatccttctcaatcacagtgtttgacagcaccgcgttcgtgtcaagaagcgtcgccacctgctttaaaatatggttaaggtgatgagcggtaaaattcacggtttgcggcttggcgagcagaagaagctctcccagcacaagatcaatccttttaatctccgaaaaaataatgtcgaaataatccgttctttccggatactgagctttcatcagctggagaaacccgctgactgacgttaaaggattccttacttcgtgggcgatacctgccgctagctccccggcaatggccagcttttgagattgcatggcaagccgttcgttcgtttccaagagctcgtcgaccgcttttttccgttcgctgatatcagacatcgtccccaggcttccgacaaattgccgtctgtggtcataatacagcttataatggacttctccccaaaagatagtgccgtcgcttttaatatatttggctgtaaacattcctgacggagcctgctgcttgatttgggagataatataatcaatgatatgtttttcttttataaaataatcattatacatcgtgcccatacattcgctgatggagtggcccgtaatcgccgtccaggcttgattcaaatatgtaatattccctttcgaatccgtctgaaaaacaatttcctgcagattgtccatgatgcggtttttctcatctgaaagcgcctttgctttctgctcgctgtccttcagctcggccagcagctgctttttattatctactttataagccagcagccagacgctgattaacgtgacggcggtaaagatgatgtcaacaggccagttaatcggattccgttcaatcatataaaatatataatcccaaaacataataaaaatcattgccaagattaaggaaatgatacgcgcttgatattttcccatagtcccacctgccgctagcatttctacatatattgtaacattgttgaccgctttattgactaaaaaatgataactattcccaattatttgagcaggttcgctttattttaccggtagtttttacacaatttcataataaaagggcggaataatgctccgccctttttgctgattatgatttatcttttaatgcttcctcgatttcctcaagcagcattttcgctccttcagggcttaagatgattttaccgttgccgtactcctgattatcaggggtaatttctccggtcattaagcaaatgccgtgcggcttgtattttttcaagacaattttgtctccgtcaacgaaaaattcaatactatctttaatagcgatatccaatgctcttctcagttcaatcggcatgacaatacgcccgagttcgtctacttttcttactacaccaattgatttcatagaaatcccctacttcctttaatgtctcttatatgtgtccaaggaaaatccttcataacgtagacgaaagtaaaggagcaaaagtttctcagcttccggaaatgaatgttctttacagaaagaaagccttttgaaatacggaatacagactttccctccttttttacaaaaacatttcattcccgccggaaacccccaaaaatcgtggtttttctcagaaactttaaatgtagaatcaattaaatcaggatagggattgggtgaaaaaatgtttcaatcaactgagatcggaatcgacttaggaaccgctaatatacttgtttacagtaaaaataaaggaattattttaaatgagccttctgttgtcgctgtagatacaactacgaaagcggtgcttgccatcggaacggatgccaaaagcatgatcggaaagacgccggggaaaatcatcgccgtacggccgatgaaagacggtgtcattgcagattatgatatgacaactgacttattaaaacacattatgaaaaaagccgggaagaaaatcgggatgaccttccgcaaaccgaatgtcgtcgtctgtacgccttcaggctcaacagccgttgaacgccgcgctatcagtgacgctgtcaaaaactgcggagcaaaaaacgttcacttgattgaagagcccgtagccgctgcaatcggtgccgatcttccggttgacgaacctgtcgcaaacgtcgtcgtggatatcgggggcggtacgactgaagtggccatcatctcattcggaggcgtcgtatcctgccattccatcagaatcggcggcgaccagcttgatgaagatatcgcttcgttcgtcagaaaaaaatacaacctgctgatcggggaacgtacggcggaacaggtgaaaatggaaatcggctttgcattgattgaacatgtgccggaaacgatggaaatccgcgggcgtgacctcgtaaccggtctcccgaagacaatcagactgcagtccaatgaaattcagcacgcgatgcgtgaatcgctcctacatattcttgaagcaatcagagcgacgcttgaagattgtccgccagagctcagcggagatatcgttgaccgcggcgtcgtgttaaccggcgggggcgcgcttttaaacgggatgaaagaatggctgacagaagaaatcgtcgttcccgttcatttggcggcaaatccgcttgaatcagtggctatcggcacgggacgttcgttagacgtcatcgacaagctgcaaaaagcgattaaataataagattgtgcttcttttttctccggccggctcatattgtgagactggagaaacattaaggaggaagcatatgctcagagatgtgggaagacgcgtagcggtagccgtcattttaagcggaattattttagggggtatgagcatttcactggccaatatgccccattctccggccggcggcaccgtaaaactgaatcacccgtaaaggcgcagcaaaggctgtgtctttttcttttgcgttcctttctttcctttatgaggcattatttgatatgatgagaaaaaccgatgaggaggaatgaacgatgagttcgtttactgaaaagctaaatacatatgctcagctggcggtagaagtcggcgtcaacatccaaaaaggacagcatgtcgtaatcaatgcctcaaccgatgtccgggaccttgtcagactgctggccaaacattcgtatgaaaaaggcgccaaaaacgtcaccgtgaattggcaggacgatgaactgtccagattaaaatacgagatggctccgtttgaagcgtttgaagagtatcctgaatgggaagcaaaaggcaaagaagagctcgcgaaaaaaggagctgcgtttatttcagtcgtctcatccgaccccgacctgttaaaaggcactgacggcaaacggattgcggcgttccagaaagccgccggaaaagcattgcatacatacagacaatatattcaatctgataaggtaagctggacggtgatcggagcggcttcaacaggctgggcgaaaaaagtgtttccggatcagccggaagacacagccgttcagcttttgtgggaagaaattttcaaaacgacccgcgtaaatgaagaaaaccctgtggaagcctggaaaaaacatgatcaaaatcttcatgaaaaagtggaacacctgaataaaaaacattacagcgccctgcattatcaggctgaaggaacagacttaacaattgaactgccgaaaaaacatgtgtgggcaggcgcgggaagcgttaatgaaagcgggcatgaatttatggccaacatgccgaccgaagaggtttttactcttccgcagcgggacggggtgaacggcacggtttccagcacgaaaccgctgagctacggcggcaacattattgataacttcactcttacctttgaaaacggccgtattgttgatgtgaaagctgaaaaaggcgaagagattttaaaaggcatcgttgaaaccgatgaaggctcccactatctgggtgaagtggccttagtgccgtacgattcgccgatttcaaagtcaaatatcttattttacaacacactgtacgatgaaaacgcatcgaaccacttggcgatcggcagtgcatatgcctttaatattgagggcggcaaacaaatgacacgggaagagcttgtcaaagaaggattaaacgaaagcattacacatgtagatttcatggtcggttctaaagatatgaatatcgacggcatcactgctgacggcaaaagagaaccgatcttcagaaacggaaactgggcattttaataaaaaaggaggcgcttgggcctcctttttttattttgcttcatacatttgcaagttggcgaagacggtttccaaaacaagtgtatcaacagacaagcctttcgctttttcaagcagaaaaccgtgcagatgatcaccttccgtcacccggcccttttccatatctctcagcatcgacgatttcatatggtaagacatacttgtcaatgtacgatagctctcttcttccagatcagggtctttcggaatgccggcagcgctgaaaatggctccgatttcagcaaaaagacgctttgccgtattacggccgccttctgtatctaaaatcggtccgaccggctgttgaaacagtgtagtcactcccgcctgcgcggcaataaacatatactttttccaaatgtccttttcaatatcccggctgatgatgacatccgctttcacacctgcaaacgcgttttccagctcattcatacggtcggtgcgttctccgttccattcaccgaaaacaaaacggtgggcagcactcgtatgtagaatttcccctttttcgttaagagcactctcaataaaacagaggccgcccagcacctgatgttttgaaaaagcttcaaacagctggttataatgcctgtacccgtttaaaaaaggaataatgaccgacgaatctttaacaaacggtttgacatcccgaatgacatcattcaacgaatacgcttttgaagcgatgataacggcgtcaaactcacctttttcgtctgccatgattaatttcggcttaattgcaacatcaccttttgcacttttgacggtcagccccgtctcttttaattgttccgcccgtttctgacggacgagaaacgtaacgtcatttcccttttctgcaagacgcgcgccgatatatccgcccactcccccagctccgacaactaaaaacttcatgatgcattcctccgtctcttttcaattcatatgttcctttattgtaacgggaagtcagaagattgaaaactttttttcacaaataaaaagcagagtctcccctgcttttttattacgcgtatagctcttcaatctttttctgtacatccgtgttttcaagaaattcgtcataagtcatttgtttgtcaacaatgcctttaggcgttaattcaatgatgcggttggcaattgtttgtacaaactgatggtcatgagaagaaaacagcatagcgcctttgaagctgattaagccgttgttaagcgccgtgatggattccaggtctaagtggtttgtcggttcatccagaattaaaatgtttgcgccggaaagcatcgcttttgaaagcatgcagcgcactttttctcctccggaaagaacgtttgactttttgttgacttcttcccctgagaacagcatgcgtcctaagaacccgcgcagaaagctttcgctttgatcatgcggcgagtattgacggagccagtcaacaaggttcgcatcgctgccgtcgaagtattcgctgttgtctttcgggaagtacgcctgagaagtggtcacgccccatttaaatgtgccgctgtctgcttccatttccccggaaatgattttgaacaacgttgtaacggcaagctcgttgcggcctgtaaacgcgattttgtcttctctgtttataataaagctgacgttatcaagcaccttaacgccgtcaatcgttttcgttaagccttcaacccgcagcacgtcatttccgatctcacgttccggcgtgaaattgacgtaaggataacggcgtgatgacggtttgatatcatcaagcgtgattttatccaggagtttctttcttgatgtcgcctgctttgatttagaggcgttggcgctgaatctggccacgaactcctgaagctgtttaatctgctcttcttttttcttattggcttcttgagaaagctttaaagcaagctggctggattcataccagaaatcatagttgccgacatacacttgaattttattaaaatcaagatcggcgatgtgcgtgcacactttatttaaaaagtgacggtcatgggatacgacgatgactgtattttcaaagttgatcagaaactcttccagccactggatcgctttcagatccaagtggttcgtcggttcatcaagcaaaagaacatccggtttgccgaacagcgcctgtgccaaaagcactttcaccttgtctgagccgcctaagtctgccattttcttcgtatgaaggtcttcagagatgcccagaccctttaacaaaatagcggcttcactttcagcttcccaaccgtttaattccgcaaactcgccttcaagctcagcggcgcggatgccgtcttcatctgaaaaatcaggcttcatataaatcgcgtctttttcctgcatgacttcgtataaacgtttatgccccataatgacgactttcagcacttcaaagtcttcatattcaaagtggttctgcttcaggatggcaaggcgttcgccagggctcatatggacatcgcctgtctgcggctccagctcaccggataaaattttcaaaaatgttgattttccggcaccgtttgcgcctattaatccgtagcaattgcccggcgtaaatttaatattgacatcttcaaataacttgcgatccgcaaaacgcaagctcacattatttacagcaatcatttataatcctccatcgtgtctaacatcattaaaagtataccatgaataaaggggaagagaaatgtttccctgcgaatataaggttttgaaaagacgcaagcgccaacccggagtgctgtgatacaatagatagatatatatacatattcatcacggaggaacaagttgaagcttttaacactcacagaatactgtcttatgattttctttaccggggtttttctggccgtcacaggctttacggcacgtgacattggcttgtacgtcggaatcgccctcatttatacgttctcgcatcttttttcaaaacggatgcttgaaaaacgcggcaaagagaagcagcaggcgaatctttttatcagcgttctggctattgtcggatcagtgctggcaacggtattgttcatcgccatcgccgcctcgtttgccaaataaaaaacgccggccgtccgaatcgggcagcgcggcgtttttattttgtctgacgcatatcatgaaacgggaagaacacaaacttcgaggtgccgacgatccggttttcggcaattaaaccgagtccgttccggctgtccattgaattcagccgattgtcgcccatgacgaagtatttgcctttcggaacctttacggggccaaaatctcccgtcaggttgactcccagttttttcgcttcttttttattgctcgcgaggtacggttctgcgatttttttgccgtttatataaagcgtgtcatttttcatttcaaccgtttctcccggttttccgatgagccgctttacataatggactttcgatgtatcgccgttaataatgacgatgtccccccgctcgatttcgccgatataattgacgcttttgttgacaaacagccgttcaccgtcatgtaatgtcgggtacattgatgatccttccactaagtacggttcaaacaggaaatggcggattaacagcgcaagtgcgactgctataatgatggcctttccccattcccaatacgtgttggattttctttttaccgatttttcagaagtaggtttttgttcttcagtcaacgtggttcctcctagacgatcactgtttcagttcatgtaccatctttactttatcacaactcattataaaatacataacgcttctatgcgtatatcattgaaaaaagcgccctttacgggcgctttttgcttatttctcttcaaccggctttttgatgattcccaagataaccgccgtcacgatcgctccgatcacgatgctcaataagtagagcagcggatgattcgtaatgaatgcaacgaatactcctccgtgcggtgcaggaagcgttacccggaaaaattctgtcagtccgcccgctaccgcagaaccgataacggctgcagggatgacgcgaagcggatcagccgctgcaaacgggatagcgccttctgtaacgaaagcggctcccatgaagtagcacgtaataccggcttcacggtcacgtttagagaatttgtgtctaaagaatgttgtcgccagtgcgattccaagcggcggaaccattccgcctgccatgatggcagcgtgcggcgcatagtttccggcatcgatcatcgcaattccgaaagtgaacgccgctttattgagcgggccgcccatgtcgatagccatcataccgcctaaaataatacccattaaaacaaggttgcctgttccaaggctttcaagccaatttgttaagaaattcataaacgctgctacaggtgtgttaatgacaaactgcatcaggacacctgtgataaaaataccgagtagcgggtaaatcaatacaggttttaatccgtcaagagactgagggataaagacgaacagctttttcagcaggatcacgacataaccggttaagaatccggcaatcagcccgcctaagaatccggcattcgcctgcgtagccataaatccgccgaccatacccggagcaaatcccggacggtccgcaatactcattgcaatgaatccggcaagaactgcaacaatcagttttaacgcattgtcgctgccgataaagttcagcgctgcagcaaacgtgttatatgtcgggtctttcggatcagctgaatgaattccccagaagaatgaaatcgcaacgaggattccgccgccgacgacaaatggcagcatgttgctgacaccgctcattaagtgtttatagaaagtgcttccgatgcttgtgcctgatttctgtttcggaccgtcttcatttgaagcggaagatcccccgccgctgccctcgtaaatcggcgcatcttgattaacggctttttcaatcagttcctgaggacgtctgataccggccgttacaggcacttgaagaacatgtttgcctttaaagcgctccatttcaacctgtttatcagccgctacgataatcgcaggcgcgtcttcaatttcctgagccgtcagcttatgtttaataccgcttgagccgtttgtctctactttaatttcgacgccgagctctttcgctttttccttcagtgcgtcagctgccatgaatgtatgggcgatacccgtcggacatgccgtgacggcaaggattttgccctttcctgagggcgctgcctgttcttcctgctcttcttcttcctcatcgtcatctttgtcatgctgattgatgatgtcaatgatcgcgtcttccgattcagcttcaagaagctgtttgcggatttcttcacgcatgagaagcgtagaaagtcttgataatgcctcaaggtgcgtattattcgctccttcggttgccgcaatcataaagaccaggtgtgccggctgaccgtctaatgattcataatccacaccttcttttgaacgtccgaatgcgatagccgggttaatgacgctcgccgttttcgcgtgaggaatggcaatgccttcgccgattcccgtcgagctttggctttcacgatttaaaatggctgctttgtaagcctctctgtcatttaatctgccggctttatcaagcactgtcaccatttcatcgataacgttttctttctctttgctttctatattgagatgaattgtatctcttgttaacagctcagttatcttcacttttctttcctcctctatagacgtgtgacttgaacttcaggaagaagctgctgtacaaactcttcagttccgagctcttcagaaaatgccgtcgcgcttccggaagcaacacctaaccggaacgcatcttccaaaggcagctgttttgagatccccgcaaggaatcctgcgacaacggaatcacccgcgcctacggaattgaccagcttccctttaggaacattagcaaggaaaaccgcgtctttcgtaaataaaagcgcaccgtcgccagccatcgaaacaatcgcgtgttcagcgccttgttcaattaatttttttccgtaaggaacggcagcttcagctgaatcaatgaccgtattgaacatttcaccaagctcgtgatggttcggcttcatcaaaaacggtttcatttctgtcgctttcatcagcgcttctccggagatgtccaccacaacgcgggcattctgctttctgcatgtctctgcaattttttcataagtgttttgcggcagggaagatggaatgcttcccgctaaaacgacgatgtctccctctttcagagcggagaactgttctaaaaaggcactgaacacttcgtctgaaattgtcgggccctgtccgttaatttccgtttcgtcgcccgttttcagttttacatttatacgagtgtcttcatccacttcagaaaaagccgtttccagaccttcttgctgtaaaaaagacgttatataatttccggtaaatccgccgacaaaccccattgcttttgacggcacatggtgtcttttcagtaatcttgaaacgttgatgccttttccgccgggatacttcgtgtcatagctggaacggtttaaaccgcctacggcaaaatcttcaacgtgaacaatatagtcaacagacggattgagggttacagtgtaaatcatggtttcactacctttacgacagttttttcttggtaattatcaaatgcaagttcttcagcttccgtggtaatgatagcggcgtcgcccaaggcggcgaacgctgcgaaagaaatctcgccgaatttagaaggatcggctaatacataggcatttttcgcctggctcagagcctttgtcttcagaagagcctcatccggatcgggtgttgtaaatccggcttcaatgtgcacgccgttcacaccgagaaagcttttatcaaaacggtactggctaatcgccgttaatgaggcgccgccgatcatcgcacctgttcgatgtttcacataccctccgagaagataaaagggaatccctttccttattaaagcgtcgatatgcataactccgtttgtgacaaccacaatgtcctttgtttgatctataaaatcaatcatgtgcaatgtagttgttcccgcatcaagataaatacagtcaccttcttctaataaagatgccgctttttctgcaattttcagcttatcttgaaggtttttggaggatttttcaatcatatcgggttcttgcctgctgttggaaagtttagatgccccgccatgaacgcgctttaaaaatccgcgctcttctagtgttgataaatctcttctgatcgttgattcagaagcgtttgtcatgcttatcagctcttgaatctttaccacatcacgcttttcaatctgatcaataatcagctgatacctttcaggagtgagcatattccgcctcctttgaaaacgtattcatttcggctataagattattgtaaacgctttttttacttcaagcaactaaaatcactcaaattcattcaataactatcaaaatctttcacatttgttcatattaacgtatgtacatagggtttgtaaactgtaaattcgacaaaaagggggacaattgtatgacattttctttttatcataaatgaaaaaagtctattatattcattcaatcattaaaacaagaaaaacccccatgcattctgcatggggcgccggttattcataccgtaacgcttcaatcggatctaagcgtgatgctttgttggctggcagcatgccgaaaatgacaccgatcagcatactgaacagcacgccgatacaaaccacctgccaggaaacgagcgacggccaccctgcgataagggaaacgagtgatgctcccccgtaaccgagaccgattccgattaacccgccgattaaagtaagcacaacggattcaattaagaattgcgtcagaatctgtcccctcgtcgcaccgagcgatttgcggatgccgatttctcttgtccgttccgtcactgatacaagcataatattcatgaccccgatcccgccgacaacgagagaaataccggcgatcgaaccgatgatcgtcgtcatgacggtcgtgacctggccgatgcccgccgcgatttcttccatattcatgacttgataagcctcttttgttccgtgattgtcatttaagagacgggccgcttcttttcctgttgttttgatttggtcggctgaatccgcctgtatggaaacattgctgtagtcatttgtaccgaaagacgttttcagcatgttgaacgggacatacatttcactgagtcctaacgataaaaaaccgctctcttcttttaatacaccgattacttctacaggctgcccgccggcccagacgatttttccaagcggagatgttttcccgaacagcttttcagccatttttttcgagatgattcccgctcttttcccggaaagaaaatcattgtccgtaaaggtccgtccatcttgaacatccagcttttttacgtccatgtagccgctgttaatgccattcagcgtaatatccgtttcttcttcgtgataacgggccgtcattgattttacagcagaagcgacaacctgctttacgccggctactccttttaatccattaatatcttcttctgtaaaactcgcttgctgcaaagcgttcggattggctgttaattcttcatcactcggcagataaaacaattcaatcgtattgcccggcccgcttatggattgcttcagcatttgctctccgccctggccgactgccaccacaacgattactgaaccgacgccgataatgatgccgagcatcgtcagaatcgatctcagcttgtgagctcttacggagccgagagccatccggagattttctaacaggctcattcccccactctcctctgctcagaatcgcgggaaacgatcatgccgtcacggacgaaaatcactctgtttgtacagtccgccacttcaggctcatgagtgacaagtaccacggttacaccctctgcattaagctccgtgaactgctccatgatggaaatgcttgttttcgtatccagcgcgccggtcggctcatcagccaaaataagcttcggttcgttaacgatggctcttgcaatcgcgacacgctgtttttggccgccggacagctcattcggcatgtgaagcatccggtccgctaaaccgactttttccagcgcatgctccgcccgttcctcacgctcttttttgccgattccggcgtagatcatgggcagttcgacattttttcttgcattcaaccgcggcagcagctgaaattgctgaaagacaaatccgattgatttgttccggaccgccgcaagctctttttccgtgcatgacgatacatcttcgcccgcaagcctgtaactgcctgatgtcggtctgtccagacagccgatgatattcatgatcgtcgattttcctgatcccgacggtcccataattgacacatattctccctcttcaatcgtcaggtcgattgaacggagaacatcaaacgtctccttgccgatctgatagcttttcttcacttttgaaagctgaatcatctatgctttcacatccgttccgtcagtcaaaccgtcagccggattcagaatgactttatcatcctttgaaagtccctcttttatctccgtcagctgcttcgcggtgtcgccgactttgactttcacgcgtttggccttcccgtcttttaccgtaaagacccagtgctcatctccgtcttttttgactgctgaagacggcagagtgtcggctttccgtttgtcggtttcaatgttcataatgagtttaaaccccggtttgccctccggaaggtttccgatcagcttgacctgaaacggatactgcacggcttgttccgtgtttccgcccgaagcggcgcctgacttttgttctggaacgagaccgacagccgccactcttcccttccatgttttatcaggaatggcgtcagaggtaatcgtaacgctttgtccctttttcactttcagcgtgtcgtattcggacaaattgccggcaacgatcaggtgttccgggtcgcctatatgtattaccggttcttgaatatccgattttttagaagctgcttcttgatttaccgagataaccgttccgtccatttcactcttgacagtgagattcgccacttggttttcaagagactgcttttgcagatcagattgctttaattcgatttccgccgttttttgctgaagctgcagatcagtccgttcggattctatttgtttttgggcttccgcttctcccacttgttttgccagatctttttctttactgtttaatgctctgagtttttcttcaatttgttcaatttgcagccgttttgattgttctgtcaactcattttgttctttatcaagattgagctgctcgtttgtataagtgactaatgacgacccttcttttaccttgtcgccttcttttactttcaccttatcaagggttcctttatccgcttcataaaaaacatactgttccttggagaatttaagtgttcccggcaccatgaccgaagatgagatttttcttttttccatggttccggtttcgaccttttccccggcgctgccgcccgcgggagcggcagacttataaatattgataccgatgaatactgcaacaattacggcgatgccgattccgatccaaagttttttcatgttacacacctgctgtcattgaacttaacagtcctccgactgccgataccaaaagcataataacaaacaggacaatcgcggaagtccaggccgcttttttcgaaatgccgccggtatagcgaagtcccaaagcgagcagaatatagctccagatgctgaaaacgtcgaacgcgcttaaaaagaccgcaacgccgtctccggccggtatgacactcgccaaagatgtaacggcgtacagggagcccgctccggtaaaataagtgacaagaccgttaatgactaagccgatattggtaataaacgccgtgaagaggccgagtgagagcatttttttgtaagttgtcacgccgcccgaaattttgacgcacagccagtaaatgagcggaatgataaaaagaccgataatgcccccgaagattcctccgaaaatcgaaccgaatttagtgagggttttggtcatttcaatctgatcatctgtcaatccttcaagagttgagctgttcagcacttcttcataattcatccccagcccgcgcaaaatactcccggctgcgatgagaatgatgacaatcaggagaggaatgccgatgaccggcttttctcttagtcttttaaactgcactacaggacttgtgatgacgccgaaaactgacggtttttcggttatttccgtattgcttttttccagattaggttccatattgctgaagcctcctatgtattattctgtttatacgtacgcaacaggcttagagaagtttcaatttttttgccgtttgcgtatttatgctaaattgtaacacaatttcatacttttacgttccataattatgtaaaaaaggatcatcatcagacggatatggagggaggctcaaaaccttgtgcgggcgccgttttcagcctgtatatgtaaagaaaacgaccttaattgtaaaatcctttaaattccattttatccttcttaggaattcggcgctgcagctgaatgttatctgcggctgtacaaaaaaaaaccggatggcaatgatgcccatccggctttttttcatcctccgcttacaggagggataaaggcaatggtatcgccttctgttacggtgctgttgtcttttacgtatgtttcattgatcgctatcatggcattgtcaatcgattgaaggccgtaccgttcctttaacagcgcttttacagcagacgctgccgcctccttttcgtcaagttcaatgaccggtgttcctgcctgctccgcaagcccggcaaacaaaagtactttaatcatcgcgattcccctttattcaaatccggttttccgttcggatagggcgtcgtttccagctgatcgcctatccattcttcaccgtcttcccagatttcttttttccatatcggcacaatctgttttatccgttcaatagcatattcattcgcctcatatgccgcctttctgtgcggagaggacacggcgattacgaccgctgcttctccgatatcaaggacgccgacacggtgagtgattgcagcttcggccccttcccatttcgcgcagatttcatcgccgatttgagaaagcatttgaacagccatgggctcatacgcttcatattcaagacgcaccgtccgccgtccggcagtccactctctgaccgtgccgataaacgttgtgatggccccggcttcacgcttttcaactttttttacgatattttccgcaataatcggttcccttgtaatttgaaaacgttccatttaagcagattcccctttcagctgcgaaagcacaaacataatggcagccggatcgtcagcatggaatacgggcatatctgcgtctgtcggcatatgctccgtatttctgctgacaaccgcgatcacgcgctccaaatgcttcagtttttgccattcttcgctgtttttgatcatgatgattttcggatgcggcgcatgtttaaacccctctataaaaaggcagtcaactcccagatattcatacaggccgatcaaacccgccaaatcccatttttttcgcgccgtaagctgcagcacgccgtccccttctactgccgtaaccgcagctccggcttttgataaacgttctgaatcttttccgtctgaaaaagggtccggttccccgccatgtccgtggtgctttaaacatccgatagtgcactctgtcggcgccgctttcagcacacgttcgataaacgttgttttaccgctgttttgaaaacctacgatctggacgatcgggaaagaattgaccacggccattcacttccattctcatcccggatgaggagcgcgtggaccgtcatgcccgcttcatatcccctcgttcctcccggcagaaggataaacgcgtttgcttcggcaagagatgtgacagagcttgatttgtcgagaccgaccggtgacgccatcatctttccgtccttatggtaaacaaacgccctcacaaacctcgtaaacggattcggctttggaaagtcatttgtcaacacggcttccgcccacccggagtgaggtttttcatttaaaagccacgtctggatcatcggttttacaaacagggtgaaaccgacgtaacatgcggacggattgccggaaaggccgaacagcagcatatcatcggcccgggcgacagttgtcacgctccccggacgcattgccactttgttaaaaagaacttccgctccgagcttatcataaatgtcaggaagaaaatcaaaatcgccgactgacacgccgcctgtcgtgatcaaaaagtcagtctttttcatggcttccttcaccgcagcatagctgtcatcaaaatcatcggaaattttgcctaagttcagcggtaccgcacccgcttcaatgatctgggcatacaccatggccgcgttgctgttgcggattttccccggctcaagcggatcgcttacatgaagaagctcggttcccgtggcgataatgccgacaaccggttttctgaccacgggaacggaagcatagccgaaggttgccaaaagagcggtgacgcccggcgtgattttcgttcctttttttaaaagagagctgccctttttcgcatcttctccttgatatgaaatattatcgcccgcatgaaaagggcgtttcactgacatgtaatccgtaccgttttcagaaaacgtctttgtcagctcaagcatcaccacggcatccgcgccttttggaatctgcgcccctgtcatgatgcggacagcttcatacggtccgagctctttttctgacacggcgccggctccgatgtggtcaattacttcaaacgtgacggcattgtcacgggaagccgtctttgaatcgcgcgccctgatggcaaacccgtcatacggagaacggtcaaaagccggtacgtcatggtccgctttaacatcttccgccagatagcggtggagactgtcctccagcggcacccattcggtatccccttgttttttataccggcccacccggcggactgcttcgtccacctgaatcggcgttcttttttcaagcatagcaatatctcccctttttacagtccgatcactctggccagaactgaatttgcttcttttatgtcatttgtcccgtggatcagtgcccgtccgtcttgaaaaataacgattctgaagtcctcgtacgcaatatgcagcagaaattcatttgcttccactttaccgattttcttcagtcgcttgacaagctcttctttatccagcctctttaacgcttccgatctgatttgaacagtgtctcttccgcacagcacgcttgctttcggtctgttttcaggctgcagatacgggtatacgggctccgtgccgcaggaagggcaatgatcccgtttggtctgatccacatttatgctcatattggtgttattccacacatcaaacgtgaaaaagcgccgatttacggcggcatgatttcccgtcagcaatttcagcgcctcagcctgctgataagcagagacgatatgaaccgccggagatatgatgcctgctgtatcacatgtcgctccgcccacgggcatttgctcgaacaggcaggataaacacggcgtaacccccggaataatcgtcatacacattccctgactgctgacacaggcaccgtaaatccaaggtgttttcgttttcagcgccagatcattgatgaccattctcgtttcaaaattatctgtcgcatccacgatgcaatccgctttttcgatcagcggttcgagcgtttccgcggtaccttccgccgcgtaagcttctatatgtatgtcactgtttaccgccaaaagacgcgccttggccgccacggctttcggcagtcgctgtctcgcgtcttcttctgtatacagctgctgtctttgtaaattgctccattccacataatcccggtcaataatcgccatacggcctgctccggctcttgccaggccctctgccgcggctgttccgagggctccggccccgacaatcaggacactgctgtcagccagcgacttctgccctttttcccctatcggcttaaatcttgtctgccgcgaatagcgctcttccatctgtattgtccccttgcaatttttatttccatcataccatgtttcttcacaatcagtcctgatttgaagactcgatatgtgccaaaagtctggtgtaatcatcccgtgtgttgatattagcgaactcctccggcgcggcaccgatttcttcagcctgcacataacagacagacagctgtttcagagtgtctgtcattttcagcttgttttgtgtaagctgatccaaaagcaccgcttgcacccgtttatgataaaccgccacgagaggctgctctctgttttcacaaattgggataacagcgtcaagatttccggtcagcttcatttcaagcgcagccatcgtctttcttgtcacgagcggtgtgtcacaggatatgaccgtatatgtttcgccttctgtttgtttcattgccgtataaatgccggccagcggccccattccccgaaactggggcacatcggcaaaaacatgcctctctttgtttgataaaaacgtttttatatgttcagggcggctgataattacggtttctccgctgccgaaggcttttttcgcctgttcataaaacatgccgtccttccattttgcaaaagctttcggttctccgaatctccgggaagctccccctgctaatattacattcacccgtttcatgtcatctctctcccattctgtataaaagcatagcaaacgcctcagccgaaatacaataattacagtgcttgtctgtttaattaagaggaatagccgtctgccctttcccatattgtagtgttaacatcatgagggagatggttcttatgaaaatatcaggtccgtttttccacgacacttctcaagagaacctttatttgaaatccgaactttccagatgcagaaaattaatttctgaatttgaagcaagctactttcatcaaaaaaacaataagctgcagcaggaaaacgccaatattaaagaacagcttcacaagctttctggcgaattggaagccatggcgcaaaaacacaaacaaacgaatgacacagaacgttctttgcatgaaatcagggccggactgctcgataaaatcgtcattctgcaagaactgctgcagcaggaaacgtttcggcggaaaaatgagatggaagaaaaacaccggctgcatctcacaaatgtaaaatttgaagaagaaaataaaaacttacatacccgcatccgctcacttgagaccgccatacaaaccgaacagacttctcacgaagatacgaaacggcgttttcacgccgcagcagaagaaaatacccggctgcacacacaaattacagaaaaggaatatcagctcaaacatattaaaatagaaattaatcatatgagagatcgaatactagaaacaaaagaacggcttgtagaaatagaaaaaacgaaagaaaagttatttcaagaaaccattctctcatacaaaaggcagctggacgaaagtgatgcttggattgccggccattttgctgatattgacagccgcacggctgaaccggcagaacaggacctggaacttccttccgcttccgccgggactgttcaggcagaagacttgcttaaagccgtcaccgaacaagtcctctccctgcaaaaacagtttgcacaatcagagtcccgtgatcagtcgtttgatgaaaaactggacgcgttaaaagaacgggctgatgaagaaaaacctttccaaaaatatgtcgtcaagcttgaaaaaaaggcggtaaaagatacgtcacttccgcagaacaagcgggaaagcgcaaaaaaactgcttgagtaacacaagcagtttttactgttttattcagcagccgtatcatttcccgtttctgctgtttcctgagaaatttctccctcaagaatatattggccgcggtatggttttttcacttcaggatacattttaattaagctttgcataaaggttgtcatattaggaatttcaaggccgctttccttttcaatttccttttgcagttctgaacttttgattgctgcattgtggcgtttcaatgttttaatggctgcttcgcgcagttttgccgcctttgaacccggtcttgccgtccctcttcttcttctagtagaaccgtctggaatgccggctggaagagtcgtaatagactgcatttgcggctgggtggattgaggctgtgtctgcggcttttggtagcttctcatttcctgtgctgcaagctctgcaagcactgggagagagtcactttttttctccggacgaaactctttttttgtatcggacaggctgcccgtattgtctaattctctcagttttgcatatattttatcacgttctatttgatattcacgaatgacttttacctctgcttcgttcaattgttctaaacgtaagcgcagcgcttctctttcattaaacatgtgtaaaaccccctgtcaaaaatttaaacgcttttattaagatattagattacaaaagtaattttatcaactattattttatcattttactattttatttactctatgaaaaattgcttattttctgaaaatggtactttatatgcaaaaatcccctatcatataggggattctgggcaatgttccaatttattgaaccatttcaaaatataacttaaaattacttgtttaatgaaaattagcgtaatatctacaattttcgactataatatgtaaaagataatgatatggagaaaacatgcggtacagcgtgttttctcctgtttctctttcgtttttaccgaagctcaacaaatcatttatgacattttggaattttttatccaataagcataaaaaaccctgctgcccaactgcaaaggactttcagaaccaatacaaaagaccggcggagattgtcccggtcactcggaagcctgctctgtttctgaaagaatgcggctgatgcgtttttcaagcattgccatcccgcttcctcccgcttgaaaatggcggagctgtccggttttatcaaaaacgtaataagccggcacatactcattttcaaacgcttcagtcagcgaatgattgctgtcgatgtaaatcggctgagagatgccgtgttcagccgctgttttcttgatttttttaaggtcaagatcatcttcggaacggggtatgtgaacggccgccacattcaaatgatctttatatttatcacgaaactcattcaccttcggcatcgcttctttacacatctggcagctggcggaccagaaatgaatcaatgccggcttctcaccgaccagctgttccttcgtgacttctccgttaaaccaggctttagcgcctgtcaattcaggcatttgctgatgtaatttcatcttatgtccctccgttatcgatcagaatttaaaaaggtctgtgattttgtctgtttccgaacggatgaaaacgttttttgtccgggcttccggttcgcaggagaaagttcgccgtttagaacactcaatgttttatcaacgtcactgcccgatgctgttgtgggacattcgcccccgggaaacactgcaccttcttcttcaattaacacgccgaattcctcatatgccattctccctcaaaagtgtatgattcagctgaatccccatgttaaaataagattgaagattcccgttcaattactatcttcacaaaaataatgatatagaaaccggtcaatatgccaaaccctgaatgtaaataactggtttctagtaaaaggtttatcttattggaaaaacgggtaaaccacttttgacttttctgcaatagacttgaaagggagacaccactatgattgatttaaaacactttgattgggccggccttatcacctctgccgggattttcaccgtaaagctggctctcatcattttagcgtattttatttttcggacggcaggcaaaaagctgatcaagcatctgtttcagaaattcgaaaaacagaacaacctctctacgggccgcgcttatactttgcgaagcctcgcgcttaatgtgtacggatacatactgattttcgtttttatcgtgatgatattggatttatttcactacaatccgagcgctctcattgccggtgccggcgtggtgggccttgcagtcggattcggcgctcaggggcttgtcagtgatatcgttaccggattttttatccttttggaaaaacagatcgatgtcggtgattatattacagttgcaggctacagcggcattgtcgagcaggtcggtctccgtacgacgcaaatcaggagctttgacggcacgcttcattatcttcccaaccggggcatcacgaatgtgagcaatcattcccgcggaacgatgcaggcgcttgtcgatattaaggtgccgcttgaaaagaatctcgatgaaaccattcaggttctgcaaaccgcgtgtgacaaagcagccgctgagctcccgcagattaaggaagggccggacgtcatcggggttcaggatttaagcacatcagaaatggtcatcagaatcattgcgaaaacagaaaatatggagcaatggcgggttgaacgcgtgctgcggagagaaatgaaaatcgcgctcgaccgttttaaaaacgccgcttccggcgaataaaaaaaccgaagcataagcttcggttttttctttttaatgaaattttttttctacttcgctgcagatttcgtcagcggtcattccggaagccgtaatgacgggagcctgagttgacgtatcggcgatgccttggacattgctgtcaagtccggttacgacacagcagtcacaatccttcgcatcctcaggagtcttcatcatcactacgtcatatcctttttgttttaacgcctgttctacatccgataaagattgttcaattccaatttttttcgtcatattgaacacctccgttatgtagagtgctcaatttttgttagattattcttcttttcggatttaattggcatactccgaaaaatatccgaccatgacattgactgcggtttccatcgcgccttcatccgggttcagctttgcatggtgaagcccgtgggaagaatccgctccgagccagaacataaagccgggatattttttcagcatatacccgaaatcttctccggtcatcgcttctttcgccattttcacttctgcaagattatgatctttgacaaattgcataaattcttcggtcaggccgcttgtattatagacttgatgataaacggacggatacgtgaccttccctttgcagcggaagccgatttcaatccctttgacgagttcttcaatccgctttttcaccatgcgcattgattcctcagaaagcgtccggatcgttccttccagatgagcatgctctgcgatgatattttgcgccgtgcccccggtaatcgttccgatagtaatcaccgcgctgtcaagcggatccgtatttctggatatgaccgtttgcagctgcgtgacaagcgtgcttgcggcgacgaccatgtcgtctgctgtatgcggatatgccgcatgtccgcctttcccttcaaggtcgatgacaagctcacttgtattggcaaatagcaatccgcttttggtggagattgtgcccaccggcagctcaggtgctatatggagggcagtgatcaaatccggcgtccattttttcagcacatcgctttcaagcatcggttccgctccgccgggtccttcttcagccggctgaaataaaaagagcagatcatgcttgaccggatgatggacaaaatgatcaataatgccgagtgcgatggtcatatgcatgtcgtggccgcatgcgtgcataaaaccggggtgttccgatgaaaacggaagtccagtctgttcttcaatcgacaaagcgtctatatccgctctgtaggcaagcattttttccggagccgtgccgttgactttaacaaagatgccggttctccaagtttcgatttcaattctttcttccgggtattggttcaatatattcagcaggtactgctgtgttttatattcctgaaagccgatctccgggatgcggtgcagatctctccggatagaaatgagccgctctttttccatatgtattcctccttaagataagaataaggcgtggattttatcatccacgcccattctatcaaaccattccttacagctggcgtaattcctgtttgatttctgttttgccttttgttttttcatcgatatctttgatttttttcgctggtgttcccgctacaacggtatatggctcaacgtcgtttacaacgatggctcccgcagcgacaaccgcgcctttaccgattgttacgccttcaagaacaaccgcatttgcgccgattacaacgtcgtcttccacgacaacaggcttagcgcttggcggctcgatgacacccgctaatacagaacccgctccgatgtggcagtttttgccgacagtcgcgcgtcctccgagcacaacgttcatatcaatcattgtgccttcgccgatgactgaaccgatattaatagacgcacccatcatgataacggcattgtcgccgatttcgacttggtcgcggataatagcgccaggctcgatgcgcgcttttacatctttcatgtcaagcatcggaattgcagagttgcggcggtcattttcaatgacgtaatcctcaattttgtctttgttttcttcaattgcggctttaatgtcagcccactcgccaaaaacgacgccggattggccgtttaggaatgttttagaggaatctccaaagctgattccctcaaggtcgccttttacatacacttttacaggtgttgattttgtactattttgaataaatgaaataatttcatttgcatccatcattttcatatgtattgtcctcctctgattttctacctcattactgtaacaaaggaaggatacaaagacaagaaaaaaaggaacaagcctttattccgccggctggctgcacagcgcggcgaactgtcttccgaagtcccggagctcctcttcctcgctgccttcaggattgttttcaattttgactgatggcagcgccacccgtcctccgcgggccgtgatcactttttccaattcgtccaccgctccgcaaaaaaactcgtaggacatatcaccggaaccgaacaaagcaaatgttttccccgcaaaatccaggttttccatatcttcagcaatatccagcaattcatcaggaagatccccgtctccccaagtatatgtccctaataagatgtgttcgtaatcattaaaaagctcggcatcgatatccatcgcttcatatctgtctactgttgcttctgcttcaatcagccctttttcaatcaaattcgccatcgcttcggtgttttctgacattgtagcataaacaagcaatacattccccatcttcgtctctcctttatgtattaaaactaatgtgcgagccgggccgcctcatacggtctgacaaatttacattcgtaaaggcccgcgcaaaaaaagctttctttccggttggccacccgccatccgtgaccgcggatcgtatcaaaccattttaattcaccggcggcgaaatcagcttgataaatgcgcgaaaacccgtgttcgtcctgtgacgaagtgacataaataataccgttatcctcggaaacgtcgagaaatgatttttcccgtatggcaggtccggctgaaatggcaaactcctcttccgtccgcacgtttcggacagaaacctcgccccgctctcccttcgccgcaccttttgccgcaatgagccaatccttctgatacatgagcattgaggccgtcatgcgctgcctttcacagcttatacgccggacgcggtctttcgtcagatcatacgcccaaatgccgccatgattcatatgaatccgggtgccgatataaatcgtcttaccgtgcaaacaaagcgaacggattactggcggctccttcaattgtgaaaagggcttggccacatgccaagtgacaccgaaatcatcagataaatagaggcagtgcgtgccgtgagcacagacaaacccgtcattccgaccggcaacagcccatacggaggcgctggtcggaaagcgggatgccgtccaggtctttccctgatcggccgatctgaggacggcgcctttttctccagctccgaatatgtaaggcccgatgtaagtcagcacatgaatcttgcttttcatccggtacagccgtttccagccttcttccccagaaaaatgaaaaatgccttcgccttttacagcgacaaaatatcccgaagacactgatgccatgacagccgtcgcgcctttatgaaacatggcaccggtctccgtggtgtgcggcccatgcaagaaaaccgcggacaaattctttgcagcattcctgatcttcagccgtctcaggcgccagctcaattttcagcgtttccggatataaattggcgccggccttttcaaacgcttcgcaaaacagcgtgaccgcttcgcaaaacttcggataggcgtggtcgcctgaaccgaaacaagccgttttcagtccgttgagctggcgatgcagaatatcttcataaaaatcttccgcttcgtaaggaagatcaccgtccccccatgtgtacgttccgacaaaaacataatcatatgcttcgagagaatccgcatctgcctcatccatgtcaagacagtcaattgcaatctgatgctcactcagtgtttcttttataatgccggcaatatcctctgtattccccgacatgcttgcgtatataattaatgctttctgcacatgatcaccccgtaattgataatgattttcattaacttatacaatactttaaatgataatgattttcattgtcaatgaaaaataaaaaaaagacagcatgattactgtctctttttaaaaagggcgttcctgtttcagcatatctttgacgaccgaaacaaaagcctgcacctgttttaattcaaatgccggctcataaccgagcagccatgtatcacggccgatcggatgatccttagcatcaagcaggggcattttatttactttgtcttcctcttctaaggtgactgacggcagaatggcataaccgatcccgtgcagcgccatctgcttgcacgtttcaatctgatcgacgaggatcgtctgtttcggcgaggttttgaatttttgatgccaccaatgctgaatttcctgaaaatatgtactgtcacttttgaactggataaacggccgatcggtatgggcaatatcatcaatacaggaaatttccgtatcgaccaaatataaatgatcggtcattaaataatcttttcggcctttccattccggatttccccggataatgccgatatgtacctgatcttcatacagacttttcagcatttcactgctccaccctgtaatgagagaaacttttgcgttcggatatcgctccacatatgtttttaacactttcggaagccagtgctgcccgataatggaggcgacggcaagcttcaatgtgccgtgaatttctccttcaagttcatcaatattttctcttattctctcttgccgatccgtgacatcatttgcaaattgtatgattttttctcctgccggcgttaccgtaagtcctttttgagatcttagaaagatctttgttccccaggctttttcaatggtctgcaatcgctgggacagagccggctgtgacacgaataaccgttcggcagccttcctcatgtttaattcctcagctaaaactacgagcatatgaagctcttgaagctgcatgtcgtcctccttttcaatgccttttcgtatttcttatctaccattctaataaaataaaggctgccgaggcaagcatcactcatatgtatgcgttttctttttctggcatgcgaagaacaaataggctgatcgtgcgagcctacttattcaatgatctgatatggctgcttaactgctttaacacgactcttctcgtgaaaatgccttcaaagacgccttcatcattttcaacgcagacaaagccgttattaatgaccatgctgaaccctttgataatcggatcattgatgtggagacggggaatgtctttcagcatgacttcctcaaccgtaatttgatccagcttctcaaactcaatccgttcaagtccgaaaatgctgttcataatcatatttgtcccgatcaaaccgtgcagacggtacgaagcgtccaggacgggaatggcggtatagccggtttttgtgagcactaaaagagcatgctcaaggttgtttccgacttgtacgtgcgccactttatccgcctcaatcataaattgtccgactgttgcatcaagaagctgatctgattgtaagctaatcatgtcacttcgacccctttacatttttcatcaaaacatgtattccctatatcgcaataatataaacattatcattttttgttgaaaagtttccgtcaataaaaaagatactctttgcaatcgagtatcaatttataggccgctgattaattttcgttccgaaaacggtcataaagcgtgacgagttttttataagtggttccatcaacgctttttgaccctgcttctatatcgttgatttcgctggtcaaaagctcaatggcatattcatgattgatcaggatattcagcagaagtttttgttcttcttccgtaaatcgttcaccgataagactcatacgtaatcaggccccctattttttactgaatacctctgaaagcaaagtgtaatttactttcagctctaccgctagaataagtaaacagaaaaaaatcgtcaaccgcataattcgacattttgcggattctgtatgaaatattattttgtgtaacgattggcataactgaatgctgtgcaggaatcgggcttgattttcgcttcaatgcccatcgaggtaatgcgtccggtcatttcttgtatcaactcttttgtaagtccttttcggccgatatccagatgcacttcaaatgtaagatccgccccttcatccgcgaaaggcaggagcaaatctgtaagttccataaagcgcccgtcgagaatatgcgcagccatctcctggctgaatgcggtttccagcgaaattttttcgcgaaggctatgtatcggtcttgcaagatcgtgatttttcaaacagccccaagctcccttgcctgtgcggtgcaagtgtatagccgtaataaactttgtgaactcgcggtaaacttgtgaatcggtccctacagacagcacgtatgctgaacgggggtcttgattgacaaagcgtttcagccgctccatcacgtcttgaaaggtcatttgtgcttcagaaagattataaaacagaaaagaatcagccatgtacggacactcctctttccagaatctacaaccaaattcgaacaagcacgttcctttgcatgatttaataaagctccgcttgcggaagacgggaagcttggtcagcctgaaaaattaaatccaattactgaaggagctcaaaaatttcaatagaaatcatgtcaatgttatcaaacggatatgtgttaggtttttcacctttttggaaaaccgtcagttcaaacgtttgatttttttcgaaatatttaacactgcaaattttttcgccgttaacttcaaaataacgctgcatcggctcgcttgccgcttccgccgtttcttgcaggctttgcagccttgtgatgatacccattaattgtgacattctaaaaaaagactcctttcaaaaaacaacttcaaatcaacaagtatttattataatacaagttctacagagcatcataccataaagtagaccgggatggcattttcccgctggattttcaaaaagaaataaacgggaaaaccgtgttttcgaatagtttgaagcttttttcagaatgtcatacaccttttataaatgatttttcgctttttgagccgccattgtcagatatatgtgagaagaggcctttttatgcgcagacgacataaaaaaacttggcgggggtagcgccaagttttttcggatcttgatctgatagaggggttggggaacagagagtaacttctctctataaccaaatgataatgattatcagtatcattgtcaatcgttttttaaaacttttttcagatgacagcaaaaaaagcggcatacagcagccgctttaaagtaatccgtcctgttcatataaataagagtaaggcagatcgataaataaatacatattgtcatccatcggatatgaaaaggttctgatcatctctcccgtttcaatgtcactgtacaggtcactgaaaaagccttttcttgaattccgcatcttcatgatgttttctaaaaagtacgggcgccagctccagtttttctccatgtattcaggctgataaaaccattcaccggattgcttgaacacatttcccgtcagctgatagccttcttcatcacacatataaattctgaaacagcagtccgtcagattttccgccagttttttaataaactcatcgtccgcctggtgggttttcttcagctcggaaacagcctgattgacccgcttataaaaattctcagagtgttcatataccgtttccagcttcttcttctctctcgtgataaattgctgaaactccgttttcaagcgttcttttaacaggctccggtctataaaatgaccgcttggcgcctgcaggtaatagccttgaaagaatcggcctccgtttctccaggcgtactgcagctgaaaatcagcttctatatcttcatacagcagcgcggccccgattttcctcgccagcaatgaaatgctgtacagcacatgctcatacgatggtgacggctgagatactttcagcgcctgcaaatctattttcagaagatccggtgaaaggagcgcgattctgtccaggttgctgctctccttacctatattgtccactgcgattttaatgccgtatgtacgatagtaggcaagcatatggtacagctgttcaatgtcgccttcgaaattgtgctcggtgatctcaagcacaatacggttcagttcaatgccctgctcttcgtattctttcaaaagctcaagaaagctttcgccatggtcaagcatcaatacatttgcatcctggttgataaaaatcaacaggtcacgatccgcttctttaaaccgctccagcgcctgcctgatgactctgtcatcgacctcaagcttatattcttccggaatgccggaatctaagaaaaacggcccgaggctctcaatctccgcatctgccaaaatacggccgagcacctcatagcccacaactctttgttcctccgcgttaaaaatcgcttggtaatacggaatgacatcatcaatattcgtcagtatatcaagtgggtccaacatgttatcacctgcttctctatctttgtctgattatacacaattatatctgcaccacaaaggtttagacattcataggggaaaaaagaggcagtatgggagcagcttaaaataaaaggggaaaatttttaaaatcactctttagataaggatgttattcatttgtttcacaatcacaaatacaagtataaatataagagcattataaccggcagctgtccaaaagtaatgactccaatcggtactgttaaacacccaatcatcatcatgtttcaactgaaagaaagttccttttttatctaacgtgccaaatgtaagagttgtgaacccgccaacactcttggaaacgtcaactccatacattgaaccggcattatcagtatcatttattggcatatacgtataatcagataaaattgtttccgccagctcggtcggcagagacacatataatacagccgatgtatcgcctccgagcccactcaaatactccctggctttaataaatttcgtttcatcaggaaaatctatgtgatatagcttttcaaatctgattatttcatcagatgtaagattggtattttgataatactctggagtaaaagcgcaaataataaagtgccaaatattaaagatattaactaaactgcttaaaaatagtacagcgaaccattttaataatttcttcaattaatcgccccttaatctttcaaaattatatcataattttgaatagaaaataaaacaagcgaacggccggctttgacgttcgcttgttttgcaaaataatcaatatatcaaaattaaaacggataaggattcagccactgcccgccgtccattgtgatacaatccccgtttatgtaggccgcttcatcggatagcaaaaacgctgccaaagcggcgatttcttccggtgtgcccagccggccaagcggcacactgttcatagtgcgggacatcgctttttccgattcaaacagcttttccgcaccgcctgttcgttcaatcgggcctggggctatcgcgtttgtgcggatgccatatttgctcccccattcaacggccagcgttcttgtcagtgacaatacccccgctttggctgcagcggaatgaacgacccctgctcccgctccccatgcgtatgtggcggccatattcaatatgacgcccttctgctccttctcgatccaatgccttgccgcggcttggctgcaaaaaaaagtgccgtttaaaacaatctcaataacagctttccatccgttgggcgtcagcttttctgccgggcaaataaaattaccggccgcattgttaatcagcgcatcaagccggccaaagacatttactgcttctgtaatcatgtctgaagcaccggattcagaacggacatccatttgaaaacaggcgacctgtccctcaaaggtctcaatttctttttttgtttcctcaagtgcttcctggttcctccctgtcaccatgacgtgccatcccagttcagcctgttttttcgccattgcttttcccatgccgcttgatccgcctgtaatgattactgctttcttatccataacaaacccaccccttttattgaatgaataatcattcataattctaccatagatgtccttccccgtcattacatgctgagaagggatttttcagccaagctgatgatataatagaaaaactctgacaaaggttggttttacatatgaagaaaatgaccagaagaacatttttaaaaagaggaatcggcattttgggtgcggctctcgcgacagcttgcggaggctacggctatgcccggtatattgaaccgcgtatgatcgaaatcacccggcataccatcaccagccgcctgattccccgcggctttgacaattttaaaattgttcaattcagcgatacgcatctcagtgacgtgtttacaacagaagacttgaataaaacagcggaaaagattaatcagctgaaacccgatctgcttatctttacgggagatttaattgataagccgcatttatataatgatcatcagcatgcgctcgccgtactgcaaagacttgaagctcctttcggaaaattttgtgtatatggaaaccatgaccacggcggctatggcacaaacacgtacaaggctctgatggaagctgctgattttcaagtaattcgaaacggctatcgtcaggtgcagctgacagacggaagccggattgaactcgcgtctttggatgatttaatgctcggaaaacctgattatgaaggcaccctttcccgtctttcctccgatacgttttccatattactcgttcatgagccggatgccgctcttaagatcggccggtatcctgtgaacctccaactgtcgggacatactcacggcggccaggtgcagcttccgtttttcggccctctcattacacctccttacggaaaaacgtataccgacggcatgtatacgctgcatgacacagtcgtttatgtgaatcgcgggcttggtacgacaagactgccgtatcgatttttagcgagaccggaaattacgctgtttactttgaaagcctcacaaaaataagacttttgtcccgatgcacaaacaccccctccttaatatgtatatggaaaagagcaaaaaggagggtgatgaaactgctgacctatcaagtgaaacaaggagaaaccatctcaagcattgcgcaggacttcagaataagcactgctgctctccttcaggcaaatccctcaatccaatcggttatttacgcgggacagcatattatcataccgaatcttcccgacccatccaccattccctattccattgtcgtgtatatcggagcgaagaaactgcaattataccgccttggcagactcatccgtacgtatccgatcgcagtcggaaaaatattgacgaccacaccgaccggggaattttatatcgtgaatcgccagcctaagcccggcggcccgttcggcgcttattggctcagcctctctaagcttcattacggcattcacgggacaaatgacccctcctccatcggcaaagcggtatcaaaaggatgcatccggatgcataatcaggacgtcactgaacttgccgctaccgttcctaatggaacaaaggtgacgattataagatagaaagatcttatttgtttatagaacgggctgatgataatatattacagtgggaccattagggtaaggagcgtgtttatggatatatttaaaaatagaaattttgtccgtttatttttcgcagcactcgcttctcaaatgggaacgactgtaggtaatatggctttcgctttttacttgctggaccgctttgccaaccagccggcatacacgactttggctgagctgatgtattcactgccgacggttttcgtatttcttattgtcggtgtcgcagctgaccggcttgacaggaaaaaggtcgcagaaaattgtgactggatcagggcgggactgacggtcgtattgtttgcggcattatacagcgggaatattcctttcgtcttctgtattttgttcatcagaagcgccgtgaccaagttctttttcccggcggaagccagccttgtacaagctattctgcctaaggagcattatgcgaaagctgcggggcttaaccagatcctgttcagcatctttatggtattcggcgtcggtatgggggcgtttatgtataaaacgatcggtgttcacggagccattatccttgattttgtcagctttattgtgtcaggctttctgatccgcgcctgccgcattccgaaagaagcccgtcagccgaacggcccttttaaatggggggattcgtttctgaaagattcggccgctgattttaaagaagggatcgtatatattgttaaaaacaaattgcttgcttcccttattttcggcttttttatctttggatttgtcaacggcggctttgccgtactgccgatgtttacgatgaaatacggacttgcgcctgatcattatgaatcacacacttcaatcttcaccgtcgcgctcggcttcggcctgcttgccggaagtgtgatcggaacaatgatcgccaaaaaagtcaaaccgcatcatttgatgtcgattcctattttggcagccgggctgctcatttttgtcctcggttatacggataagctgtggatttattatacggccgctttcgttctcggcatgtgcatcggacctgtcaatatcgccatcggcggctggatgccgaaaatcgttcatccgaaaataatgggccgggtcagcggctggcaggatccttttatgatgtttgcccaatccattacactcggactggtcgccctgttatttccgaaattcgtttccaatattgattacctttattacggcatgggagtcgtgattttggcggtatttgtgttctattttatcgcccttccgaaatacagcgccgaggcagcagaagtcgatgtgcagcgatcattaaaagctgattctgaaaaacacgcgaatcctgtctaataaaggaaaaaaatgcgcccttttcatcagaaaaaggcgtatttttataatcaatatttgcatttcaatgctaaaaaagtataatctatatatgaacttgatcaatgcaaaggagagaaataatggacgaccacgcttattcgaaagagctgcagccaaccatcgagaatctttcaaaagctgtttatactgtgaaccgccatgcaaaaaccgcccccaaccctaaatacctttatctgctgaaaaaacgggcattacaaaagcttgtgaaagaaggcaaagggaaaaaaatagggcttcacttttcaaataatcccaggtttagccaacagcagtcagacgtacttatctctatcggagactactattttcacatgcctccaacaaaagaagacttccagcatcttccgcatttaggtacgttaaatcaatcgtaccgcaatcctaaagcacaaatgtctttgacaaaagcgaaaaacttattgcaaaaatatgtgggcttaaaggaaaaaccccttgccgccaacagacagcagcccgcttatcataaacccgtgtttaaaaaacttggtgagagttatttttaattcaaaaaagccgatgcatgacgcaccggcttttttctattcaataacgtacgtatccacttttttaattaactcgctgatttcaggcttgctgatctgttcatctgctccgacgacttcgccccggtggcgcaggtcgtccgtaatcagagacgagaagatcataatcggcacgtcagagctttgcgggttatccttaagcagcttcgtcaaacgatgcccgtccattttcggcatctcaatgtcactgatgatcatgtcgatatggtcagacaggttttctccgttatccgtcagttttatgatgtaatcatacgcttctttaccattttcaaacgtaacgatttcactgtaccccgcttcagtcagctcatcagtcaagaggcgcatcagaagcggcgaatcttcaacgatgatcagttttttgcccgaccgtctttcatcaaacccttcctgatggacatgataagtctcaactccggatgccgattcaatatcgtaaatgatcttttcgtaatcaggtaaaaagatcatcgtgtcttccagtttaatgatacccgttaagtgccgctccatgccctgattcagcgaagtcggcttctcaatcgcttcccaggacaccctgtggatttgtgaaacggaaccgacatgaaagacgattttccgtttgttgaattccgtcacgatatatttatcgtcttttgctccttcggcttcaacgccgaaaaaggtatacaggctgatgacgggaagaatttcgcctctcagcttaatcatcccttctacgtctttgtgagactgaggcacagatgtgacatctaccggctgaataatttcccggactttcatcacgtttatgccaaatgtattgacacctacttcaaatttgacgatttctaattcatttgtgcctgaatccaataaaatatcgtattgttgtaaagacaattcaatccctcgctatccgcattcagtattgtattgtatatatcggctgtaaacggaaaaagtgaatgtattccggacaactgaacattaactctttataaaaagattcttttttctgatagcccattgactttttgacatcgagtggtaaaatagtcaaggatttttcaggaagaagggtgtaataaatgggtacagtagtcatattcgaccaagatcaaatgacggtgttagaagatatcagcaaaacggcttacctgcaaatgaaaaaagaggcgaaagagcgtcccgataagccggctccatacatcgtatggcgggaagacatcagctttgaatacgggtattaatgaccttcgccacatatcacaatagatagatcatgatacaatgaagacaatcatttcagctggttgtcttatttttttctgaaagaaggtatgttttcacatatcggacatatactcgggatagttcaattaaatagatgacaaatgctcagctagtggtaaaataggataaactcaatatatagtataaggtgatgaattatggaacatttgcttaatccgaatgtaaaagaaattgaaatttcaggaattcgcaaattctcaaatcttgtagcccagcacgacaatgtcatttcgcttacgatcggtcagccggactttttcacgccgcaccatgtcaaagcggccgcaaaaaaagcaatcgacgagaacgcaacggcatatactccgaatgcgggcggccttgagctgagacaggccgtacagctttatatgaagaaaaaagctgatttaaattatgaagccgaaactgaaatcatcgttacgaccggagcaagccaggcgattgacgcgtctttgcggacgattttatctccaggcgatgaagtcattctccccggaccgatttatcccggctatgaaccgatcatccgcatgtcgggcgccgttcccgtccatgttgatacgacgacacacggatttaagctgacggcgcggctcatagaagaagcactgacgccgaaaacaaaatgcgtcattcttccttatccgtcaaatccgaccggagtgaccttgtcagaggaagagctgaaaaacattgcagccgtactgaagggcagaaatgtttttgtgctgtctgatgagatttacagcgaattaacctatgacagaccgcattattcgatcgcgtcttttttgagggaccagacaatcgtaatcaacggcctgtcaaaatcacacagcatgacgggctggagaatcggtttcattttcgcaccgaaagaaattgccaagcacatcttaaaagttcaccaatacagtgtgacatgcgcgtcctctatctcccagaaagcggcgcttgaagctgtgacaaacggcgttgatgatgcgcttattatgagagaacagtataaaaagcggcttgactatgtatatgaccgtcttgtttcaatggggcttgacgttgtaaagccgtcaggcgcattttatatcttcccttccattaagtcattcggaatgtcatcgtttgattttagtatggctcttttagaggatgcaggtgtggctcttgtgcccggcagctcgttttcaaaattgggtgaagggtatgtgaggctgtcattcgcatattcactggatacattgagagaaggcttggaccggctggaagcatttattttaaaaacgagagaatccatgcagactatttaaacaacggcataacgccgttgttttttattgtttcgggaatgtaatgtgaaaagccgtgcctttatccggtttgctgtctacttgaatggctccctgatggtttttaatgagattgaatgtgaccatcagccccaggccggttcctttttctttcgttgtcagaaacggttcgcctatccgtttcagcacgttttccggtatcccgtcaccctcgtctttcaccgtcacattaacggaatactcatcttctgtcatgagaatatggactgttcccccatccggcatcgactcaacggcatttttaatcagattgataaacacctgcttcagctgattttgatcaccgttaataaacatgctgtcccgttcgtaatctgttttgataaatattcctttaagatttgcctgcgtctctaacagagcggttacttcacttataattttctttaagttgacacgctctttcacggcattgtgctgaggtttggcaagcattaaaagctcacttaaaattaattcgattctgctcagttcagaaaacacaatttcaaaataatgttcgttttcctccatcgtcggcttcatgagctgtaaaaatcctttgatcgccgtcagcggattacggatttcgtgagcgattcccgccgccagctgacctgcgatagacagcttttccgacttcagcattaattcctccgtctgcttccgctcagaaatgtcacgcagaatgacctgcacggccatttctccgaaaaacgtcgtcggaatgcagaccatttccgtgtagatcagccggtttttaaaggtaaaccatgattgcttaatgatttctgactcggtctttcggtcgataatatttcggatccgctgtttcacgccatcatgatcgcagggatgaagctgatcatagacgtttttcccgattaaatcttcataggtttcggcctcaaacagagaaatacccgactcattcatgaatacccatttgtcattgtgaatcacggcgatcgtatcaattgagttctgaatgaggagctgataccgctctctgcttttttgcaaaatcgtttggaattttttccgtgaagaaatatcaatcagcagcagcaattccgcccgctggtttttatatgtcgtcggtgccgccttcacttctaaatgaacgggcgtgccgtcaagccttctccacgtctgttcaatcattccgacttccatccctttttgcatccgcacaattcggtttttcacaatgtcgtgatactcttcttcgataaactcataagattgcctgccgattaccgcgtctttgctatcggctcccagcatggcaagcatcgcgttattggcgtacgcgattgtaccgttgatgctgacatataaaggattcggcagcatttcgacaagacgctcaaattcgccgtttccagccgcctctgcggactgttgttctgcctttcgcttcttttcttcatgcatataaggcctcgggggtgtcttctccttaagcaccttgattttaaggatgatttcccgatctgtcccctccatttgcggtgtgacaatttccacacccgcttcaaaccatacgatggtatgatcttttttaataagacgaaaggtgcaaggcattaaatgatgctcattgtagaagtaactttcaaccaaaaattgatcttcttcatgcaggaacgttttgagaaacgatccgatcatctcttcctgggaatagctgaaatatgatttgcagtttgcagaaatatacataatacgcccgttagacgtcaatacggcatgaagatcgtttttcgattgaagctgttttacatgctgagtatcctgttccacagaatccctcctttgcaatatactcgcactgcaggctggtcacggactgatataaaaagaatttccactagattgattcgctaaaaaatgagcattctccttctattcttattgtgaacgtcaattttcctgaatgaaagaaagggcgcacgatatattcggcggccctttcatttgttattttttattgtatttcttttcaagttctttgtaagcgtcaattgctcccttggcaatgttcttgctgacatggtctttatcatctcgaacagacggaacgacgacgctgaatgccactcttggatgttctgacggataatagccgacaaaggtcaggttatacgtatcttttccccaccagtttctgttcgttccgtaatagaacgtctgtgccgttcccgttttaccggaaacatcagcgccggaaccttggaacgttgaataagccgttccttgaggtgagcttgtaaccaatttcatccctttatgaacttggtcaaaatcgctcgggctgttatttactttgttcaaaactttaatatcgcgctgttcaatcgcttttccgatcttatttttgctgtccggttcatgaatgcttgtgacaattcgcggctggacgcgatacccgccatttgcgatggctgaaatatattgggccatttgaagcggcgtatatgtatcaaattgtccgatcgcaaaatccagcagcaatcccccgaccaattgcggatttgactgcattcccgctgattcctgaggaaggtcaatcccggttttcacacccaagccgaattgggcgtagtagttgcgcatttttttaatatcgtctaatccggccggcagcgtgccgcccggggtgtaggtaatacccgcgatatgcatggctacatgaaacatatatacgtttgaacttctttgcagcgcggtcagctcagtaatgggtcccatttgtgtccacgattgttttgtcgttttgtctttaaaactaagcggtgcatcgacaaacgttttataatgcgggaggccgctttggtaacccgcgagaacagtcgctcctttaacagaagagcccatctcatattgggtcgtaaatgctccgatcgcaaaatcctgaattttatttgtttcgagatcgatgcgtttccccgccattgagagaatatccccattgttcgggtccatcatgacggcaaatcctctgtcaaccatatagttgcctgcggcgcggcttcttctcagctctttttcaatgaccttttcgactttcgactgcagttccatatcgagcgagagctgcaggtcgtagcctctgctgccttcatcgacgggcttttggctgacaacttcacctttgctgttttccacatactctactttttctttatgtgcgtttaaatagtcttcatattgatattcaatgtagcttttacccactcggtcattcagtgagtagcctcttgtgacatagtaatctttccgttcgcccaacaatccctgttccggtgtcgtcacgccgccgaacagagagtacagcgttttgtcgtacggatatttccgcgtccagtcattgattacgtcaatgccggggagctctttcaggtgctcggatacgacggaaacttcttcatatgtcaggtcgcttttcggtttttgcttattattttcatgctcgtcaagcagtgaaccgctgtttccgttgccgttcagcttattcgggttcattgatttaacgacttgcggctgataggcgttgccgcttgaaaaacgcgtataaatcgccgcgatttgcagctcttttttatcttttttgatcgcatcaatctcctgcttagggactcgttcaatctggcgtttgtatacttcttgcgatttcaggctgttttctgaatccttcataagcttttctgccttcttcggatgtgccgcaagccagtaatcaatgatatttcgatccttcataaattcagtatcaatatggatcagtgcggcgagattttttgccgttttcaatttgtcctttgccgaggtttttgaggtggatacgtatacaatttcaggcacggcctggttatctaccgccaccctgttctgcctgtcatacatctttcccctcggtgtcggataataggcggtttttgcgtttgccttctccgcatcctgacggtgtttatcaccttcgacaatctggacgacgccgagtttaaaaatcagtgccgtaaagagaaggaaaacaatcaaaaaatagagattcattctcagcgctctgtaacgtttcgtttttttctttgggtcgcgcgcgacttcagccactttctattacacctctcacatcatacaatatatttacataaacagattttaattgtaacatttttgtaaaagttgttacagcgaaaacgggtaaaaaaaactgtcaagatcaaattatcttaaaatatatctaacacttcaaataacttgaagtgatgtaacggattttaaaaaataaatacagatcgtttatcctgatataaagccatttttctgtgctcaattacaattatgacaaaagtttgttgtcaaaggaaatgactggctgcattatgacaaaaaagctgtgataagatttttcatgtagaaaaaaacttctctgggaggctatgaacttatgaagaaagcatttatcttatctgccgcagcggcagtcagtttgattacattcggaggcatccagcaggcatctgccaaagagctgtcatgccagcacgtcgttactgtgaaaaaaggaaacacggtacagcatctgactcttcaagaggctgttgaaaaactacatatgaaaacaagcgtaaaaaagctgaacgttaaaaatgagaaagaactgacacagcttctgcaaaaacacgcaaagcattctgatatgacagttaaagacgttcaaaaagaaacaccggtaaaaacggctccggcagctgctgaaaaaccgaaagccggtcaaaaccagactgctgacaatgcaaagcagacagataacacaaacaacagcagcgagaaaactccttcatctgtcagtgcgtacgaaaagaaagtcgttgaattgacaaatgcagagagacaaaagcaaggcttaaaacctttacagattgatgaaaaactaagcaaatcagctcacgcaaaatcacaggatatgaaagacaaaaactatttcgatcaccaaagccctacttacggctcaccttttgatatgatgaaatctttcggcatcacttataaaactgccggtgaaaatatcgccaaagggcagccgactccggaagccgtcgtcaaagcttggatgaacagtgaaggccacagaaagaacatcctgaaccccgagttcactcaaatcggtgtcggttatgtagaatcaggtaacatctggacacagcaattcatcggaaaataaataaaaaaagattgccccgacgggcaatctttttcctgcactttataaatttataaacttttgaagctcccggcagagaggtgtcgggagcttttttgtaaaatctcaaacgtgatgattatattgattttgctcagcctttcacttctttagtaatacttttttataataaaaagtagaatttacctatttttccgttgaatacttttccaaaatttattagtataggtaaatgggtttctaaataaatggagaaaggaagtttcaattgaaaaaaattgtaatgacactattcgcagctgctcttttgacattcgggattttctcaaacagttcagaagcgtttgccatgacttcaaaaggagcaattaaattccaaacagatgctaatacttactcaaaacacgctacttctattgtcgtaacaggtactatgtctaatcatgagctaaacgagggtgttgtagttgatcttttaaataaaaaaggagattcagtcaaatatacaattgttaatggccgtaatattcgcagttttaaagtaagcttttcaacaaaaaatattccagcaggcaagtatgatgtaatggtggcaacgacttggggaaatcaaacccatagaggagtactgaaacactatattactgtacaacattaaaattcatattattaacaaatgggtttaacgttgatttcatctggaattctcaaaaaacagtgtaatgatgaaatctctgaatcgaggatgttttcgtaaatctcttggatttatctcttggatttattacgatacatccttttttatttttcagttttgctagaaggctaatctgtagagtttcaatttcggatgcaaattattaggttttaattgtgggaacacaaactcgatttatcgctatgtacatttgggttactcgaattcatagtttgaatcaaacatgatacatcctactgttggaaagttgtattaatccttataattattcggaaatcccccttttgatttataatagacagtctgcatcaaacaaacgagggggattttccaaactattcacagtagaacattataaatggatacacgttaatacattcccctgccaagttcctgtcttcattaaaggctctaagaatacaaggtttgcagatcgttgtttacaaaacaccatcgtaagccttcgcttcctcggcatccataaaatatcgcattcgggcaatctttttttatttcacccaaagcttataaatgctttgagtcccgctattttcttcaccttgcgcggaaagcttgtcgtataatgatttggcaagcgccaatccgggcatctcttctcccatgagctccgcttcttcaagagcgattcccatgtcttttataaagtgtttcacgtaaaatccgggtgcaaaatcgcctttcagcatgcggggagcgagattggacaaagaccagcttccggccgctccggttgtaatgcttttcagcacttgttccgggttcagaccggatttttcagcgtaagccatcgcttcagccactccgaccattcctgctgcaatcgcgatctgattgcacattttcgtatgctggccgctccctgccggcccttgatactgaatgttctcccccataacggagaaaagcggcagacatgcttcaaatgcttctttttctccgccggccataatggcaagcgttccgttccgggcgccgatgtcaccgccggaaacgggtgcgtccaaggcgtgaattgacttctctttggccttctccgctatctttttcgccaaagacggttttgatgtcgtcatgtcaatgacaaacgccccttctttcgcatgccggagaataccgttttcgccgagatagatttcctcgacatcgctcggatagccgaccatagtaataatgatgtctgctttctctgaaaggtctttgactgtctcctgccagaccgctcccttattcaggatctcctccgctttttgtttcgtccgcgtgtagactaaaacaggataacccgcttctaaaatgtgcgctgccatactgtttcccatgacgcctaaaccgataaatccgaccgttttgttcactgcgctttcctcccctgatgcgattcatatatcactctttcatgtctagattaccatattacagactagagtgaaaaagagtccgcgctacaaggtgaatttagaaatggcgctgatcagatcttcactcgcgctctttaacatgtcagtcgattgcttcactttttcaagcgtaacgagctgttcatcagttgaagcattcacttcttccgccgctgccgcagattcttgagaaatagcggaaatgctttgaatcgcttcttgtatcgccgcttgttcttcactcattttttgaatgtcattgtaaatatgatctatgccttgaacgagagactgcatttctgtcgtaatcagattgagcacttcacccgtttcatgaatggcgctgttttgttcatcattcattctgcttgcctcgatcattgcgtgtgacgcatcttttgtctctgattgaatcagtcggaccgtctcactgatatggccggaagaaagagctgattgttcagcaagcttgcggacttcttcagcgacgacggcaaagccccggccgctttctcccgctcttgcggcctcaatactcgcattcagcgccaagagattcgtctggtctgaaatcgctgatattgccgtcacgacttcttctatgtttttcgtttgtttttccagatcagtcagcattgcctctacttttttcgtttctgaattggcttcatttgacttcataagcagctggccgagcgcatccagtcctttgtagctggcatcctctgaagattttgagagttgttttatgctgcccgcgcgatccgcgattccttttattttaactgagagattttctgatctttcattgattgtctcaacctctgacgcttgttctgtcgctccggcggcaacttcctctatcgcttttgcgatttgtccgctcgtttcatttgtttcctgtgagatgacggttaattggtcagacgtgtcggacactttttctgaagaggtcttgacctgttcgaccatctctttcatattttcaaccatttggttaaagtcttttgttaacacgcctacttcatcttttgattttgtctgggcgcggacggttaaatctcccgctgagaccgaatttgttttggcgatcagctgctgaatcggaccggttatcgatttcgcgaggaaatagctgagtccgatcgtaatcacaagggcgatcagtgacatgaaaatgctcacagtattcattttgtcagctactcccatcagctgatctttttcaaactgcgttccgactttccaccctgtttcttttatcgtttgatagacaaccatgttgccctcgcgctctttgacgccttctttgtctgagctgatttcttttaacgtttgatcttccgaaatgtttttcccctgttttgacggatgcgccagaagagaaccgtttttcatccgttaaaaatgcaaaccccttatatggaaccttttgatcattgaccatgctctgaatggaggacagcttcaggtctaagctcgccactccgatgacggttccattgttttgtatggcttttgccgctgtcacgatcatgtctcccgtcacaacatctttataaggctcagtccagaccaccttatccggtttttcgaccgccatcttataccacgttctatttgtcggatcgtagtctttggcaaaatcagcctttggatatgtaaacatttgtttgttcgcggttccgacgtatgcaagcgcgacatatttgtcattctgtccgatctgctttaactcatcattaaagagctgtgcggtttctttcttcccatctgttaaaaacgtccgggacaattcaccgcctgctaatctcaataatacagtctcatcatttttcagctgaagctcaatgttctgaccgagtgaattggtgacattctctgtcgtacgttttgcttcctccgtcatcatgggctttaatgtcaaatatgaagaaaccgttaaaaaaacaaccgttacgaaaagcattgctgagacaaatacagcaattttgatatgcatttttttaaacataaccatcccctcctgaatgttatatcggtctttcggccaagaaaatgaataaaccttgaaataaatatcaaaaatttccgccatttggcgcagcaaaaaaagagccgtcatgccgacagctccgccttacgtaaaatattcgattttcgctttcggaaaataagtttcgatataagtctcgagcgtttcccttaaggcatgttcttcgtccttttgatatatatacttgccgattccgtagcgtccccatttgtaccttcgcttttcttcatccagctcaagctttgttttcggatagttcttctcgatcacccgtttggccggttttgtgaatcggtgctgaatcagttcgaatgtaatgtcatgccgaacatcttcagcaagtgccgcgtcaagcttctcaaacagttccttatagccctcttcccagccatcatgaatataaatcggcgccacgatgaaaccgagcggatagcccgctttagcgactttgacggcggcttcaatccgtttgtcgagcggagatgttcccggttcaaaatttttaatgacataatccgcattgatgctgaatctgaaccttgtctttccgttatgcttcgcatcaagcaaatgatcgacatggtgaaatttggtcacaaatctaagctttcccaattcactttgtccgaagtgttcaatggccctttttaatgtgtgtgtcagatgatcgattcctacgatgtcagacgtacaagaggcttcaaatcttgtaaattccggagcccgttctttcatatactcatcagcctgatccagaatctcttccacattgacatacgtacggatgtaaggctttgatcccatcgttgtctgcaggtagcaatagtggcaatgccccatacagcccgtcgcaaatggaatggcgtattcagcggacggctttgaagaatcgaatttcaatgttttccggacgccgatcaccaatgttgattttgcgttccgatattgctgcaaatggttttttcccggaatattccggacttgattatgcgatgtcgtttctctgatttcaagtcccatgttttcaaacttacttttcagctcttgccctaacgggtattcgagcgctcgcggttctatataaacaagctgggggacaaacggtttcagcatggactgacactccctttacatattctcatgttgttactttccgtccaaaagagagtgaatatgcgttgtaaacatttcctttgatcagtgataccggtcttcgtcaaaaagttcgctgtaaagcgcttctgcttcctcatatgtcgaaaagaccgcatcatcttcggccagcggatgataggtttcgtataaaaacagagacagttctccctcatgatacggatgatgaacgatctctgcttctttaatatgggcaacattggcggcatgcggattgcggtaaatcacatagaccgtatcccccgccccaaacggttttgtcatgataatccctcctgttgaaagttattgttccccgcttttttccgaatatgaaaaaaaccagacggcttacaccgtctggctgttgtattacttattgaatgtttctttaacgaatgcgacaacctcttctgtcgtgctcatagacaagattgtttctttgaatgattcagcttcttttttagaaagcttgctgatctgcgttcttgccggaaggatggatgtagcgctcattgagaactcatctaagcctaagccgagaagaatcggaatcgcaatttcgtctcctgccatttctccgcacatgccgacccatttgccctctttgtgagcggcttcaatgacaagggtgataagacggagaatcgccgggttgtatggctgatacagataagccacacgctcgttcatacggtcagcagccatcgtgtattggatcaagtcatttgttccgatactgaagaagtcaacttctgtggcaaactgatctgcgataacggctgtagacggaatctctaccatcataccgacttcaatatcgtcagaaaccgttacgccggctttgacgagtttttctttttcttcaagaagaatcgctttcgcctgtttaaactcgtttactgtcgcaatcatcgggaacatgatttttaagtttccgtatgtacttgcacgaagcagcgcacgcagctgagttctgaagatttcttgctcttcaaggcaaaggcggatggctctgtagcccaagaacgggttcatttctttaggaagctgaaggtaaggaagctctttgtcgccgccgatatccaatgtccggacgacaactgattttccttccatacgctcaagaaccgttttataagcgtcaaattgctcgtcttctgtcggaagctggtcgcgtcccatgtataggaattccgtacggtaaagccctacagcttctccaccgttttcaagaacgccttttacatcatcaggggtgccgatgtttgcggcaagctctacatgatggccgtcttttgaaacagtcggttcattgacaagctttgcccactcagctttttgcgccagataagcactgtgtttttcttcatatttctttaacgtttcactggaaggatcgatgataacatcaccatcgatgccgtctacgattaccgtaacaccgttttcaattgtgcctgtagccgcttttgtgccgacaacagccggaatttcaagcgaacgggccatgattgcggagtgtgaagtacgtccgccgatatcggttgtgaaaccttttacaaattgacggtttaattgcgccgtatcagacggtgtcaaatcttcagccacgatgacaacctcttctgagatcatgctcgggttcgggatttccacgcccagcaggtgccccgtcacacgttttgttacgtcacggatatccgccgcacgctctttcatgtattcgttatccattgattcaaacatggtaacgaacatggaagctgtttccttcaaagcgaattcagcattgactgaatctgtgctgattttctcctttaccggatttagcagctcaggatcactcagaactaaaaggtgcgcggagaaaatgtcagctttgtcttgtcccagttcttttaaagcatgctctttaattttctcaagctcttctttagaacgtacaatcgcttcatcaaaacggcttacttcagccgcagcatcagcaatgtttttcttttcaaccgttaagtccggctcttcaagccgatatgcttttgcaatcgcaattccggctgaagcgcctattccttttaattcttgcattactcgccgagtccttcgcttttcattgtttcttctaaagcgttaagagcatcgttttcgtcagcgcctgaagcggaaattgtgatttcagcgcctttagcgatacctagagacataacgcccatgatagacttaaggtttactgttttaccgttatattctaagtttacgtcagcatcatatttgcttgcagtctgtacaagaactgtcgcaggacgagcgtggattccggaatctgctgttactttaaatgttttttgtgccatgattatcattctcctttaaattaaagctatattactacacaatattatatcatacagccgtacttgtcatctgacaagcacggcgtatttatatgcttattttccgattttcacaatatctttttgttcccgttttacagtaccttcggctgaaagggaaatcgtttcgccctcggcaaggtttgtaaagacaatcggtgtcattaatgaaggaacatgaggtttaaccgcttcaagatcaacttcaagcagcttttgacccggttcaacccggtcaccttcagaaacaaatgaagtgaatccttcacctttcaggctgactgtgtcgataccgaaatgaatcaggatctctcttccgccgtcagactgaaggccgatcgcatgttttgtcgggaaaacattcaacacttttccgcggactggcgatacgacaattccttcttcaggaagaatcgcaaaaccgtcacccatcatttttcctgagaacacttggtcaggcacatccgtaatcggatggatttcgccggtgatcggagaagcgaacacttcttcaccctgctcatttcggagcggctccgcgataacctcttcaacctgctggctgacttcttcttgtgcggatactttcggttccgggcgcggcgtgcgtcccgcgataatatcctgcatctgagtttttaaaccgtcagagcgcgggccgaaaatggcttgaatattgtttccgacttcaagaacgcctgatgcgccaagctgtttcagtcgggccttatccactttcttctggtcgttgaccgtgacgcgaagtctcgtgatacaagcgtcaaggtgcttaatattttcctgatcacccattgcctgcaggatttcataaggaaggtcgccggcttcgcctgatacgcctgccccttcatcctcagcctcttcttcacggcccggcgttttcagattgaactttctgatcgcaaacctgaaaccgaagtagtaaatgagggcaaatcctaagccgactggaatgaccagccaccaagccgtacggttaggcagaattccgaacaggaagtagtcaatcaaaccgcctgagaaagtcataccgatttttacatgcaatagctgcataaccataaaggaaagtccagcaaatacgcagtgaatcgcaaacaggataggagccacaaacaagaatgagaattcaagcggctcggtaatccccgttaagaaacttgtcagagcggcagaacccatgattccggctacaagttttttcttttcaggcttcgcttcatgatagattgcaagcgctgccgccggaaggccgaacatcataaacggatatttccccgtcataaatgtacctgccgtcagctgtacgccgtctttgatctgagccatgaaaatccgctgatctccgcggatgatgtctccagccgcatctttatagctgaaaaattcataccagaacggcgagtagaaaatgtgatgaaggccgaacggaattaatgaccgttcaatcattccgaaaataaaggctgccaaggttggattcgcttccacaagtcccgttgagaaggaattcagaccgtgctggattggaggccagatcactaacataataagaccgagaattaatgcggaaattgatgtgataatcgggacaaaccgcttacccgcaaaaaacccgagatactgcggaagttcaattttataaaacttgttgaacaataacgcggccagaaccccgacgataataccgccgaacacgcccgtcgccaaagtcggtatccccagcatgttaatataggccggatgattttccgcaaaaaactttgcccgttcaattttgtcagacggaatactgccgtttgccatcagcacggcgctcatggatacgttcatgaccaagtatccgataatagccgcgattccggcaacgccgtctccattcgcaagaccgatcgctacccctactgcaaatagaagcggcaggttgtcaaatacgatttggccggcgctttccatgacgttcgccacaagctgcacgttatcattgctcaagaaatgcatcacttgaatcatatctttgttctgcatggcatttcctaacgcaagcaagatccccgctgccggtaaaatcgcaaccggaagcataagagcacggccgattttctggagaacgccgaataatgctttaaacataaaagatgtacctcctctgttagctagtgtgaccttacagcgaaaattcatgacaacgaattcataggcgcaagtcttcagtttaaccgtttacatttgcccttttacacaacaaaaaaggcatgagtaaaaaagggtgtgcaaaataacgggaccgttcttcccgttttttaccctcaatcactcatgcctgatcgaatcagtgacacgtttttaaaggtttcaactgaaattatgaaattttattggttaatcggtacagatgaagcgtgagataaaccgcttccgcctcatgaactggttttttcagcatttgctgcaagatttttatcagtttccaagcagtattgtagcatagcgggtattcatttttcaataataacattaacttttctggttcttttgtctgctcttcccgcttaatcctgtctatggtaaatctgatatgccggatcagccgcaaatagtggacgctttctttattcacttccatttggaaagattcctctatcacctgaacgagccgggacatcagctgtgaatgctggttgacctctgaaaggggccgattcgtaagagcggaatggatatgaagagcaataaagccgatctctccttccggaaagcagattcccgtcttttcattaatcatgccgacgacttcacgggcaatttgaaattcttccggataaagtgtttcggtttccataagaaacgggtttttaatgtcaaagccctgctgcagccgctttaccgcgaaggcgatatgatccgtcagcgcaatatggatatgttcattcaacggctggcttgtccgcttcttgatatgataaatgacgtcattggagatgtcgacaagtgtctcgtccacataaccgaggagctttttaaattgtttttgttctttttcatcctttaagatgaacatcttgtcatatcctttatcttcaatgacatccgcttgtttttttccaaagccgatccctttcccgattaagacgacctcactgtatctatcatgtgttgcgatgagcacattgttatttaataccttctcaactgtaaaggaccccttcatgatcctcagctcctttgtcattcaatacctcatatcgtacaaaacgaacggaaagcgcgtcaattctttttttagacggatgatcgttcaataagccggtaatcaagaaccttccttgacgggggctctccgctgatccgattctcaagcatgtgaaaagcctgctttcccatttctttcgtttgtatatctattgtggaaatacccagcatcctgctgatatcatgattgtcgatgctcaaaatcgcaagctcttccggaattcttgtcccgtttgctttggcttcaaggtaaagaccggcggacacttgatcattcgccgcaaacagcgcagtcggtttgtcatcccagctctgccatctatgaaaaagagcttttccgtcaagcagcgtcagcgccttttccacaaccagctcttccctgtaaggctgcccgatcttcttcagcgcctctttatatgcggcaatgcggacttgactgtttttccccttttttctcgccaggctgatcgctattttccggtgtcccttttctatcagataatccagaccgtgccgaaatgcttcccggtgcggattactgattgaggaaagccccgccgtatcagtatgctggcagaggatgagcggttcttgcacggaaagcagatgctcatcaggaattgctttggagcagataatcaggccgtccacttggcgctcctgtaattgtgataaggcaaagcgttctttttgctgctgataatctgtctggtataaagaaagatgcacgcctgacgcttcggcagcctcagcaatacctgcgacaaggtctgcaaaatacggaagattcaccgacggaagcacaacgccgatcatatcggaaaaacctttggataaatgcacagcatgaatgttgcgcctgtatccgagcgattgcatcgcttttttcactctttctcttttgtcttcacttacatacggatgattgtttaatactcttgatacggttgtaacggagaccccggcagcgccggcaatgtctctgatcgtggccatggcgtccccccttcttttttcccttgatctggaatgcgtttcatacagtaagctaaaaacagatacagcctattcgtttgaaaggagaataacagtgatggggattctttgcttaatcggtttgtgtctggccatactcggcggcagttatcttgctgtgcggccgctgcgggaaaagcatgatatcaaaccatttcagcattttgatgattttttcatttaaaaggtgataaaaaaggacgctgccttccagaaccgtccttttttatcacaaagctttctatttcaggatcgttaattctttcggatactgcgttaatgtttcggcgccgtcttttgtgacaaacacgtcgtcttcaatgcgcacgccgcctacatcaggcacgtaaatcccgggttctattgtgtataccattccttcttgaaggagtgtgtcgttcgcactgctcattgatggatattcgtgcactgaaattccgagtccgtggccgagacggtgcaggaaatagtccccgtatccggctttttcaataatgccgcgggcttttaaatcaagatcgccgattctgacgccgggtttgcttaattgaagcgccgcctgttcagctttaagcaccgtttcgtaaatctcttcctgcttcgggctgattgattggtatgcgaatgttctcgttatgtctgagcagtagccgtcaagaataacgcccagatcaaacagaacgaaatcaccttttttcaaccggtctgtacccggatttccatgaggctggcctgatttttctccgaacagcaccattgttgaaaatgacatgccctgcacgccttttttcttcagctcaaactcaatctgcgccagtacttctgtttcactcacaccctctttaagcgccgcgacaccgacttcaactccgtaatccgcgagttttgccgcttccctcagaatgctgatttctttctcatctttgacgagacggaattggttgagtgtttcttctgccgatgcaaatgcggcgccacctgaagcgtgcttaagttgttctgagcgggaaagtgagatcgaatccttttcaaccgcgatggaatcaagccgcatatttcgtcttgcaagctcggcttttatcagctcccacggatcttcgtgatcaccgtatccgataatatcatgctcccacccggcgctgcgggcttgtccggcttccattccggggcaaacgaaaaacggctcctgttcctggaacaggaataatcccattaaccgctcatgcgggtctgtataaaaatcagtcaaataaaatacgttttcctttgtatgtataaacgccgcgtcatgcccttcttttttcagccaagatgaaacacgttctaatctgttcatttttgtttttcctccttaccaatgtgactcttttttcattctatcagttttccggcgtttatgctgtgaacgaacattaaaaaaacagccgcccggtgtgcggctgttctgcttattttaataatctcagtccgttcagtatgaccagaatcgtgcttccttcatgaccgatcacaccaaacggcagttccatcacctgcagaaagttggcgcagatcagcaggcagatgaccgaaagcgagaaaacaatattctgcttaataatccggttcattttccgtgagagtctgcacattttcacaagcttataaaggtcatttttcatgaggaccaagtcagcggtttctaaagccacgtccgtccctccgcccatcgcaataccgacgtcagcggttttcagagcgggcgcgtcattaatgccgtcccccaccatggcgattgtaccgtacgtttctttcagcttcttcacttcttccgccttttggtcgggcagacaatctgcaacaaccgtcgtcatgcccgcttcttttgcaatggcagccgctgtttcaggctgatcgcctgtgagcatggcggttttaatgcccagtgatttaagttcagccatcaccgctttggcttcagggcggatttgatcctttaaagcaaagcagcctgctatccggtcatctttcttaacgaaaacaagcgtaaagcctttcccttttaactcttttcccgatgttttcaaaaaagcgtctgccgcctcttcgcctgcaaatcccgcttttccgatcatccatttaactccttctatatcagcctgaacaccgaatccggacgtctcgtcaattaaagtatggcctgcgggcgcggcgcctcggctttcggcaaattcagctatcgcttttgcaagcgggtggcttgattgcttttcaatcgcatacaccgcttgcatgatctcatcttcattcacatgttctgccgcttggaaaaccgcgactgccggctgtcctttcgttaccgtgccggttttgtcaaacgcaatcatccgaacgcttcccagctgctctaaaaatacacttcctttgaccaataatccgttgcgggccccatttgaaataagggaaagcgcagcgggcatgatggaagcgacaagtgcgcacggcgaggcgaccaccataaacaccatcgcccggtaaaaggtttcactccagctccatcctaatgcaaaatgaggaacaaataaaagcaaagccacggctaaaagcacgcctttgacatagacactttcgaatcgctcaataaacgcctgggccggtgacacactgttttgagccgattccaccagtctgataatttttctgaataaggactgttcatttgttttcgtaacacggactgttaaggagccgtttccgtttaccgttcctgtaaacacagaatctccgggtgttttttccgccggcatcgcttcacccgtcagcgccgattcatcaaggctcgtcacgcctgactcaataatcccgtcggccgctacccgttcgcccggcttaatgacgatcatgtctccgatcttcagttcagcggccggcacccgcttttcctgtccatccgcaatcaaggtcgcttcctccggctccagtttcatcagggaggttaaatcacggctgctcttattcatcgtatatgtttcgagcgcgccgcttaacgaaaaaataaaaataaggacggcgccctccgcccaataaccgataagggcagaaccgacagcggcaaaaatcatcagcagttcaacatttaacgtcttcgtttccagtgtatcctcgatgccctctttcgcttttgcaaatccgccgatcaggaaggcaaggatatacaaagtgacggacaggccttttgtttcggtgaaaaaccaggccgcaagaatgagggcgccggatacgagagccgcgatgagctccgcatgctggagccacttttttccggaccgttcttcttgtatctgctgttgtgaatgggcttgagacatcacttgttcattcattatgaattctcctctctaattgagaacgcaaatcatcttcaattccccgataaaagcaaaaacagccgcctaacaggcagcattttcacagtaatatcgcggtgttttctttattatagcatgccggcggaagatttcaattataattgttttaatttctttttgataataattatcattagcactccttcagctgttcattatatgcaaaaaaaggccgggaggaaatcctcccgcgcctttttatttctcagaccattcttttaattgtgatgcggtcatcggaccgacgatctttttttcgatttcccctttttcattcaacagaaatgacgtgggaatcgtcatcacattgtattccttcatgagctcgcctttagagtcaagaacaatcgggaatgtgagatggtgctgattgacaaagttttgaacggtatctttgtttcgctcggcattcatcagatttaccgttacaagtcttacatcatcggactgactctgttcatagtacgtttggaactgaggcagttcttttttgcaaggcggacaccacgatgtccaaaaatgcaaaattgttttctgccctttatccgggatcgatatctcgtctccttcaatcgtcttcatcaaaaacacagcgggaattgcccgtttttctgatgaggctttcgcttcaggcatccagacggctgcagctatcaaaaggactgcacatacaataaggcgggttttatgcatacgatcttcctttcatgcgtttcggatagcttgcccttccttatcgaaatgtatcagccttcaatccggggcgctgttcttccgcctcccgtcagaaacacggagacaccgaggtctttgcagattgtcgcgtaatgtaaacttgtcagaagaatcatgccggtattcatgccgagtataatgccgagcatttgcaattccggcatagaaccgagcacatacatcatcgaaagcgccacgatatggctccatacattatgataaaacgccgtctttacatggccgatgccgatcagacaggcctgaagcggcatcacgaacagatgaaaaagaaaatacggccacaaaagctgcaaataatactgcgcttccggagactgaaaaaacaaatgggtcagcggggccgcgaactgaaacataatccagacagccggaatgccgtagccgaatgtaataaaaatcgattgtctcaggcgtttcagtacaatatcatattgagacagcgcgtacgcttctgaaatgctcggaatcataacaaccatcagcgaatgagcgataaatgcgggaaacgaaccgatcgtcaccgctacaccggcaagcatgccgtattgatcaatcgcagcggtcccggctgcccccgacgccagcagcgctccttttactaagaagggttcaatggcgtttgtcaccgcgtgaaaaatacgaagtcccgttgtcggaatggatacggccagaaggcgtttcctcacatccttgccgcgcaggtgaatatgctgatggccggaaagcgtcctccgcgctaaaataaactgcgtatacaagtaaacgaacaccacgacatcgcttgcgaccagcacaaataatgaaatgagcacggccatatcaatttcaaacgagtaccattgaaaaaagataaacagacaaagcacttgaatgatttttttcaatacattcgcaaccgcgattttccccatttgctgcacacccataaaatagcctctggcgatggatgtaaaagcgacgacggggatcagtccgatgacaatccctttgataaaagggtgatacgtatcgaatacaggaatgaacggcagcgcgatgcttgcggccgcggttgaaaacgcggtaaatacggcggtcattctgaaggcatgccgcagcatgctttcatgcagcttctgattggattccgcgatgaattttgaaatggagatcggaagctccagactggcgatcacgataattaaaaaaatggtgggcagaatgctcatgtaaagccccatcccatgctcgccaagctcccgcgccagtatcatattcacgacaaattccagacattcagcgaaaaaggcggcaatggataaaagaatgatccctttcacaaatcgattcatggtgtctctccttgtctctcgttcttccatcatcatatgagacaagttctgaaaatattttcgatttcttaaaattgaaaaaagcatagccgggatatttgatcccgctatgcttacatagcaaatacgtgtctgccgatccgttcgataatttttcgggaacggatccagttgtcagacgccgttttcggattgtagaaaaacaatgcgctcgtttctctgcccggatggtcaagcgcctcatttgcggcggcaatggaatccttatccggcttttgattaatgcttccgtttgctaccggctcaaatgcattcctttgatagatcacaccccgaatggtatccgggaagccgttcttttcagtccggttcagcactacgctggctaccgcaaccttccctttataagactcacctttcgcttccgcgtgaacgagacgtgacagaagttctctgtcagcacgggaatacgtctttttcgggggctgataagccgtctcctccggtttggctttcttctccagatgagatgacagctttatcggatggatagaatgcttctgatcagtttttgaaagcttcggaaccgaaccttttctatttaaatcagcaaccagtgtgctggattcttgctttggcttcttcgctaaagtaaacagagcttctgtatgttcaatttttgttgcaggcataaaacaaagaaaaaagacagccaaggcagcaaattttgtcgtcatacgatttcctccttaaatacttcactaccttaacaagagctgtacgcaaattcacggttaaagattttccagcgctcccaatcagcttttatgatggaagaagttcgttaacatccttgttattggaaggaaaacggccgtcattctcacaacattaaccaaatagcagtaaaagtatccatcggagggattttacattttgtttacatctgttacagcaggatgaaatgaaacaccgaaatcaaaaaaagactcctcatgtgcgaggagccgtcagcttcttggctgttctaaatactggaaaacaacatctccgccctgctgggcaataccgcggaaatgcttaaaatcttcctgcttcgacaaaaccgctcgaaatgcaagaaaatgttctttctgcaccctgaattctttgacttcaccggtgcgtatttggttgatacgttctgatatttcctcaggcagcaacaaacacaccccccttttctcggctttttcccgaaaatcaatataccatctttcccccgccgggacaatgattgagcgggctgatacccatatcgctttacttcttaaagaaaatactgcaaaatattttcaaacaggatttatgataaaggagaggaagctcgtgaaaattgctaaggttggaaacgtcattgaatttaaaaacggattaaccggtatcgttgaaaaggtaaatgaaaactccgtcatcgttgatgtaaccatcatggataattatcgtgatcttgaattagattccctcactgtcgtcaaccataagaattacaaaatcatcaaagactcctattaagccccaccaaaccatccgaaccatttacatatcccgtacaaaagctgccgcccggcagctttttcaaatgaattcagatctcagtcatttcaacaaaaaaatctccggtctcgtctttattgtaaagatttgtgacggatgtatagtagttggttattttgccgcggaaatcaagcccccgctttggcaccttgatttcaaaagttttttcatacaaaaggacggcaatatcatgatacgtttcagaggtcaccttcaatataaatgagataacgcggccgtttttgcccgcactttctttacagtcatacatcttaagccttacaccgttcaactctaacagctccatgaaaaacactccttctttttacaggacatgctatcattctgatcatttattcacaattgatccgctccgcatggaaaaaaacggcgcaggcctttacaaacgtatgttccctattttatgataaaacagacgagctgccatccagcacccgtcacgtaatgaagcggcgagtacactccccccgggtttactcgtcttttttcttcccttcagacttttcccgtaacgttttgcagacaaaaaaatacccccgccctaaaaggcgggggttttaggttacgccccgagtccgtatccgtctcgtaaattaacggttatcaatcgtctccgggtacatatcatgattcatcatccgatgttcggccattttttcatattttgttcccggtctgccgtagtttgtatacggatcaatggagattccgcctcttggcgtgaatttgccccacacttcaatgtaacgggggtccattaattcgatcaagtcattcatgatgatgttcatgcagtcctcgtggaaatctccgtggttgcggaagctgaaaagatacagctttaacgatttgctttccaccattttttcgtcaggaatatagctgatatagatggttgcaaagtccggctgtcccgttttcgggcaaagcgacgtaaattccggacagttgaatttaacgaaataatcacggttcacatgtttattcggaaatgattccaaaacctccggcgcatattcaaataaatagtttgtcccttgattccccaggagcgtaactccttctaattctgattcttttctggtcatgtaaattctccctttctattaaactccccgtttattgccccagagcagtgtgtgcagctgaggcaggactctgacgagattcagatcggcatcggcagaaaccttatcaacgagtttttcatactttccgagcagatgcgcaattaatgcctgatcgtccgtcgtatggacgttatcgttaccgacctgaagataaaacgggatattcggataccgcttatgcacggttttcgcgaattgcagatcttcatcattaaaaataacgacttttaagctgaccgcgctgagcctttctgccgcatcaagcgaagacacaatatgatcaagctttgcaaaatcggttgtcattcccgagcttggcggcttcggtgaaatggtcagatcgttaatcatggtaaaccaatcctgatagaccgttccctgcgtttctaaagcggcgcgcacaccgtggtctttcaacagcagaatcagcgcgtcaagctgctttaacagcgccgggtttcctcctgagatggtgacatgggaaaaggcgtctccgccgatttctctcagctcgcggtaaatgtcttccgccgtcatccagcggatatcttttttggctgagccgtcccatgtaaaagcagagtcgcaccagctgcaggagtagtcgcagccagccgtgcggacgaacatggttttctggccgatgaccatgccctccccttgtatcgtcggtccgaaaatttctaataccgggattcctttagccattcatatcaccttttttcgggcggtatacgcaatagctcgtcggggtttccctgacaaaaatctggacgcagaccggctgattctccagtgtttcaaggtaggactgaaccttatcgtaaatcgttttggccacgacttcagttgtcggaagcgagtatctgtcatcatcagaaaattcatcatggtcattcatcaatgtgtggtcataagcgccgtgcaccaatttcttcagcacgctgaaattcacgagaaagcctgaatcatccagttcatcacctgcgacggtaatatttacggtatatgtgtgcccgtggactctgctgcacgctccggcgctttcacggggaataaagtgcgcggctgaaatgtgcatgtccttattcaactcaaacgaataaggatgctgaacctgcgggtaaatttgagaaagcaattaattccgctctcctttcattttcatatattcatcatatcctttattgcggagcagacatgccgggcattcgccgcatccgtccgcaatgatgccgttatagcaagtcagtgtgttattctttacaaaatcaagcgcgccgagctcatcagcaagcttccaagtttccgctttgttcagccacataagcggcgtatgaatgacaaacggcttttccatcgccaagttgacggtgacattgcaggacttgacaaactcgtcacggcagtccgggtagccgctgaaatcagtctcgcaaacaccggtaatgatgtggcgcgcgccgatttgatacgcaagaatggaagcaaacgataagaacacgaggttgcgtcccggcacaaacgttgtcggcaattccccgtccttcgcttcaatttcgatatcatcccgtgtcagcgcgtttggcgcaagctgatttaaaagagacatatcaagcagatgatttttgacaccgagtttttcggcaatcgattttgccacatcaatttcttcttgatgacgctgattgtaatggaatgtaacggtttctacttcttcaaagttttgcaaagcccataataaacaagtcgtgctgtcttggcctccgctgaacaccacaaccgctttttcttttttcatttcattctctcccttatctatcattccataaaaaaagcgcctttctcggagaaggcgccctaaaaaacataaaaaaaaccgtatccaaggatacagctcgtccttagttttttatagagggtgtagctagaacctctcccgcatagatacggattttcttcttttttcacttttgctatcataccataatgttgtttcccatgacaataaaaaaacagcctgaaaacctgtgtcaggctgcaaaagccggtttaagccccgcgcttcttcttcggaaacgccatcagcgcaataccgatcagaacaaataaagcaggccagaaaacagaaaccggaacgatcggatgatacgtcatcataaagcaaagtgctgtcaaagtcagcaccgcaatcgggatgagcagcgccttttgtttcccgccgaacagccacagctcaaataaaccgaatgccgccgccagcaggtaaacaggccacgtcacaccggaataggaccaatttgttgccgtttcaaagacaaacaggagccccgtaatcaataaaattccgcccggtacgagaagccccgcgttttttaccggtttcgggccgaaaatcggaatatgaaaagcggcggcaagcaaaagaatgagagcgggccagccgcgttcgctgatgacttcatttgcattcgtgaatatgccgaaaatccctatagcacacagaaccgccgcagaagccaaaagccctctttgctttctgccgaacatccaagcctcaaacaggccgaacgctacggcaaagagatagacaggccagctcacatttgcgtatgtccaatccgtcagcgtttcaaaccataataaaccgcccgtcacaagcataatgccgcccggaatgagaaggcccgttctttttttcggctgcatgaaggcagcggcatgaaacacaagcgcggcagcaatgatcaaaagcggccacagccctgtcatcagcataccggcaaaacatagagcgcccgccgctgtcaggatcaaagcgggaatcaatgcccctgtctttctcccgccgaaataccacagctcaaacagaccgagagcaggcgcccaaatataaacaggccacgtcatggctgaatacgcccatcccgttgccgtctcaaaccaaaataagcagcccagcaccagaaacataccgccgggaacgagcagtcccgcttgttcaggcgcttttttcacaaaaataaatccagcgtggaaccctgcggacattataatgaaaagaaacggccacgccgaaccaccggatatatgtataactcccgccttctgtaaaaaaaaacgcaatgccgatacaaataaaaataaatcccaataacacacgtcgatctttcatctcttactcctccccatcatttcccaattcattatacagaaatgacaggaaaaaagaaggggaattcccaaaaaatacagacattttccttatatccgttatttttctctcgggatttttttgcaaaccaatgcgccgataaaggccaggctcacatatccaaacaccgggtaaacagtggaaatcagctgtccgtagccgatttggctgacaataaaagcaaacaccaaaatgccgccgtaaatatatgtactttttatatgaagaaaactgtttaattgtttttccaatccgtataaattgccgatgaccgacgtaaacacttccccgaaaataataatcaaataaatgagatgaagcgatcgtgaatagaaatagacaacttgagccatcggaatgtcaaactccagtacatccggcagcaccgataatgataagaaactcgcggcaagcaccagtgtcaaaagagcgccgcctaagtaagctccccttctgatcaccttctctgatgacatttcgttcgcaagcggcacaaggacagcttgggcgagcgataaatttaacgcgccgtaagagacggctgacaaaagccaattccacttgtcaggccatacccattcttccgcatttctcgtgcttgtaaatacaaaagaatcagcggcaacgataaaagagaaggaaattaaaagcggcacaaccaatacattgacgccgaacacacctttaacaccgcttgtcatgacggcaaaactcaatacgatcgtcaaaagtattcccgcttgtgcgggccagccaagctgttcatgaaacagcgctcccgctccggacagcatgacagaagtcactcccagcaatataaacatcataaacatgttaacggcgcgtccgatagaccggccgaataaatacgtgttcaattcctggtaagatgctgcatgaatccgtttggaaatgatcatgattttggcgcctaaatatataaacatcagaccgcttaccatgataccgaacagaccgatccagccaaacctgaggaaaaattcaacgatttcccgtcccgtggcaaaaccggctcctacaaccgttcctacgtatacgaatgcaagctgacttgcagaaccttttgtttgtcccatttcaccctccggctaagcgcaaatttgtccaggcctttttatatgcttatgagacaagtcgcctgaaaagaagaacaaatcgtcctccccgggaaaaaacagattcagctctcttctaagcaaaaatattgaaagaaaaaaagcgccggcgtatactcttcatcaagaaaggtcaaagcatttcatttcctttctgatcatattggtcaataataatcaaacatcacaaataacacttaacacgctgtaaactttgatttttcggggtttaaaacaaaacacttgaaagtcaaagaaggtcagagtatactattaatcaaagaaggtcaaagttaagaccttattttctaatccatttggtcaaagatgatcaaacatttcaaggaggttttggcaaatgcgttgtcaacattgtcagaaaaacgaggcgacgattcgcctgaacatgcaagtcaattccattcaaaaacaattcgttttatgtgaaacatgttatacagaattaacccgaaaaccgtctatgagcatgggaccgcaatctttcggattcccgtttgagcaaggtttcgctccggatcaacataaacagcaggccggccgtaaaaaaggcctgctcgacgagctcgcccaaaacgtcacaaacggcgcaaaagcaggtctgattgatcctgtgatcggccgcgatgaagaagtggcgcgcgtcattgaaattttgaaccgccggaataaaaacaatccggtgcttatcggtgaaccgggtgtcggtaaaacggctattgcagaaggcttagcgcttaaaatcgctgaaggcgatgtgccgaataaattgaaaaacaaagagctttatctgcttgatgtcgcttccctcgtcgccaatacaggaatcagaggccagtttgaagaaagaatgaaacaattaatgaacgaattaaaagagcggaaaaacgtcattttgttcattgatgagattcaccttcttgtaggcgccggctctgccgagggatcaatggatgccgggaacatcctgaaacctgcgcttgccagaggcgaactgcaggtcatcggggcgacgacattgaaagagtaccgccagattgaaaaagatgcggcgcttgaaagacgcttccagcctgtcatggttcacgagccttctatagaacaagccatcagcattcttgaaggcattaaagataaatatgagaaataccacagcgtcacattcagcgatgaagcgatcaaggcgtgtgttacgctttcttcccgctacattcaggaccgccacctgccggataaagcgatcgacttgttagatgaagccggctccaaagcaaatctggagcttgataccgtaaatgaagaagaagcggctgagcgactcaaagcaattgacgcggagaaaacaaaagcgcttcaggaagaaaattatgagcttgccgcgaaactgcgtgatgaagaagtggcattggaaaagcagctggcacaagaatcaccggtctcttcttcagaaatcggggcggagcatattcaagccatcattgaacagaaaacaggcattccggtcggaaaactgcaggctgatgaacaagtcaaaatgaaagaacttgaagaacgccttcatcagcgcgtcatcggtcaggaaaaagccgtgaaaaaagtggcgaaagcggtaagacgaagccgcgccggcttaaaatccaaaaacagacctgtcggctccttcctctttgtcggaccgaccggggtcggaaaaaccgagttatcaaaaacactcgcggatgaacttttcggcacaaaagattccatcattcggctcgatatgagtgaatacatggaaaaacacgccgtttcaaaaattatcggttcaccgccgggatatgtcggacacgatgaagccggtcaattaacggaaaaagtacggcgcaatccgtacagcatcgtgctccttgatgagattgaaaaagcgcaccctgacgtccagcatatgttcctgcagattatggaggacggacgtctgacagacagccagggcagaacggtcagctttaaagataccgttttgatcatgacaagcaatgcgggaaccggcgaaaaacagacgaaagtcgggttccaatctgaagaaagcgttatggaagaacaaacgctgattgattcactgagctcgttctttaaacctgaatttttaaaccggtttgacagcatcattgaattccaatctctgaaaaaagaacatctcgtaaaaatcgtcagtctgcttctcgcagaacttgaagacacattaaaagagcgcggcatcagtctctgcgtcacagacgatgcgaaagaaaaaatcgctgaaatcggctaccaccctgctttcggtgcacgcccgctcagaagaacgatccaagaattgatcgaggacgaaatgacagacctcttattggatgacaatgaaataaaagccttccatgttgtaatggaagaggatgacatcaaagtccgtgcacaataaaaaaaagcggttccctgtcgtggagccgcttttttgtttcttttactctgccaaaagggcagaaactgtgaagaattcgggaacaatttctcaatcactctaaagttccatgcactgccaccgatattaaccatagaaagctagtataaaggatttggtgaaaactatggataaaacatcgattatcggtatcatcctcgccttgattgctttaagcgtgggcatggtgctgaaaggggtcagcttaagcgcactcgctaacccggcagctattctgattattttgttcggtacgatttctgcggtgatcatcgcattccccggaaaagaaatcaaaaaagtgcctgccctttttaaagtgctgttcaaagaaaacaaacagctgaccattgcgcaattaattcctatgttctctcaatgggcgcaaatcgcaagacgtgaagggctgctcgcattggaagcaagcatcgaagacgtggatgacgcgtttttgaaaaacggcctgagcatggcggttgacggacaaagcgcagaatttatcagagatattatgactgaggaagttgaagcgatggaggacagacaccaggccggtgcagctatctttacccaagccggcacatatgcgccgacgctcggcgttttgggtgcggttatcggcctcattgcggccctttccaacatgaacaataccgaggcgctcggacatgccatcagtgcggcgtttgtcgccacccttctcgggatttttaccggatatgtactatggcatccctttgccaacaaactgaaacgcaaatcaaaacaggaagtcaaactgcgtgaaatcatgattgaaggcgttctgtcagtgcttgaaggacaggccccgaaagtgatcgaacaaaaacttctcatgtatcttcctgcgaatgaacgcgcaaaagtcattgaacaagaaggagaggcaaacaatggcgagaaaaaagaagaagaagcatgatgacgagcatgtggatgagtcttggctgatcccgtacgcggaccttctcacccttcttttggctctgttcattgtattgttcgccatgagctcggtcgacgcggcaaaattccaaatgctgtctaaatcatttaacgccgtttttacaggaggcacgggtgtccttgaatattcaagcgtcacccctcccgaaaacgaaaaagacggcattgatcagttaaaaaaagacaaggacaaggaaaaagaaaaagataaagaacagaaaaagaaagaaagagaagcagccgaccgccaagagcttgaaggtgtgcaaaagcaagtcaatcaatttataaaaaacaaaaagcttgaacatcagctggaaacaaagctgacaaaagaaggcctcttaattaccattaaagacagtatcttttttgactcgggacaggcagttatccgccaggaagatatcccgcttgcaaaggaaatctcgaatctccttgtgctgaatccgccaaggaacattatcatcagcgggcataccgacaatgtgccgattaaaaactcacaatttcaatcaaactggcatttaagcgtcatgcgggccgtcaacttcatggctattctcacggaaaaccctaaacttgacgcaaaagtattcagcgccaaagggttcggcgagtataaaccagctgcgtcgaacaaaaccgcagaagggcgcagcaaaaacaggcgcgtcgaagtattgatacagccgagaaacgccgccactgacgaaaatcagtaatataaaaaaggaagcctttcaaaaggcttccttttttatttctgatgaaaatgtttagcgtttaatccctctcttttcagcatttccgtacacaattctatctcttcatcactcagcacactgatcatttctttaatctcgtctgcatgatcagggaaaatatcgtccaaaagacggattcccttttcagaaatctgtgcgaaagtcactcttctgtcagtcggtgaagcttttctgatgagaagttcttttttctctaatttgtcaacaacgtatgtaatacttccgctcgctaataaaattttgtcgccgatctgctgcagcggctgattgcctttgtgatacagcagctccagcacagcaaattccgtcgggttcaggccgtgcttatgaatatgtttattcatatggtcgttaatggaccggtacgcccgcgacagtacaataaataatttcaatgagttttctgttttatccgtcatacattcaatcatccttttgcaaaagaaaccgttacagagaaacattaataaacaaaatgaaaaatgtcaacaaaaatgtttccaaaatttctcttctttttgacaaaccttaataaaataatttgtttttatatcattttggttattttttcttattaaagaagtataaacaatgatataatacctctattcaagtgtaatgttggagcgatgcagagtgaatacattcaaaggtgcccggggaaagatcaagctttatctcatattggtgatcatcccggcacttattatcagctttttcatttatgaaaaagaaaaacagaaaatagccgataaacacatacaggaagccagtatgatgctcaaccttcaccgcaacaagctcaattatttaatcggtgaaacaaaagcccggatgacaacacttgcgatcgctgtcgataagcctgtcaatgaagaaaagataaatgaaattctcgatcaggcttttgaggatgaacccagattcagcggactgtatatgctgaatgccaaaggtgacgtcatcgcaagcacgaccgatctgaaatcaaaggtgaatttggccgacagaccgtattttacgaaggcaagaaagacgaagaaaacggtcatcacaaatgactaccccagcagaattacaggccagcgcatctttacgatctgcgtgcccgtgttagatgcaaaccgggaggtcaccgattatttagtggcctccatacaagtcgattatttgagaaatatgatcaatatgctgagccctgacgtttatgtcaaggcaacccatcaggataaagtgatatttgccagcggacgcgctgatcaatcagaaggcgtgcagccggtcagcggctatctggatgatattaactggaatatcaatgtttttccgaaaccggttgagctgaacgagctgaccaaaagcgtgctgctgccgatgtccagtatcgccgtgctgctgaatattctgttcatcctcgttcaatattatctgcttaagcgcaagacccagctggagcgcgctcaaaacgaggcgcagaaattggagctgatcggaacgcttgccgcaagcaccgcccatgaaatccgcaacccgcttacagggatcagcggcttcattcagcttttgcagaaaaaatataaaacagaggaagatcagctgtatttctcaattattgagcaggaaattaaacggattaatcagattgtcagtgagtttttagtgctcggcaaaccgaccgcggaacgactggaagtgaactcgctgcaggatatccttgatgagattatgccgattatttattcggaagggaacctttataatgtggaagtaaatgtggagattctcgtcaatcggccgctcaaggtcaattgcacgaaagaccatattaaacaggtcatcttaaatgtcgcgaaaaacgcgcttgagtcaatgcaggaaggcggccggctgtccatctatttagaagcccgcgaccataaagcagtcattaaggttgctgacaacggaatgggtatttctgaagatatgcttgagcacatttttcttccgtttgtaacgtcaaaggaaaaaggaaccggtctcggccttgtcgtgtgtaaacgaatcgtgctgatgtacggcggttcgattgacattcaaagcgaagtcgataaaggcacagaggtcaccattaccctccctgccgcttcacgatgaaaaaacaccctgtaacagggtgttttttagataaagaagaatatgtgtaagaggatataccggggaacggcatcatagccggcagatagatacgaggcgcttcgtgagctgtgccggcggaaaaacccgctgactgtacgcggtcatctttcggatgcgacgcttgatcaggaagcgcattcagtcttcgttatctgtttatcattaatcatttgtttgcttcatatgcaggcatgatatcaccgcgggagaacaagcctattttcttcacaaggccctgtattccttggtgatgtgtgcgttcacggtttatcagctgctgatatgcgttcatcagacagtccagttcctggctgtgcctgatcgtgtcataccctgtaaacccctgcctgttagccgcatctatcatcatttttctcttttcatcaatagatacaagcaatttttcttgttcagaataactgcccattcacttcacccctcaccgctaaaagaataggaaacaagtttgattgggttattgagcattattacagattatactttatttgtaaacatttttttactaaataacttaatttttcatttcatattggaatctttagcatgattacgagaataatacccattcaggtaatgatataaacagaatacggcatatttcaacgcacaaaaaacagagacagctgattttatattataataaaaaacctctcatgccgctggctgcatgagaggttcgcaagtctatcagttttgcacactttcattttcgtaaatcggcacccagccttcagtcgtcacgaagattcggattgcgacgaccctgcggtcttcctgaagcgtaaagtagtggcggatgttctccggaaccgaaatcaaatcccccggatttaaacggacgtcaaaaaaagtgccgtctttgccttgaatgacgaagatgccatgcccgctgacaataaagcggacttcatcatccgtgtggtgatgttctctttggaaatttttcaataattcatctagattcggcgttgagtctgataaagaaatgacatcctgagactgatagccgcgccgggctgaaatatcctgaatctccttgtcaaatgccgcgagaatccgatctttttcagcttcggttacatcatatttctccgaaagctcaggcggaagtttttcaatgtcccactgctcatagattacctcttgttcgtctaaaaagcgcgctacttcttcctgattttcaatgatcgtattcttttcatcatgaattctgattgtcgccattttgcattcctccttttattttacgagctgcggccgaagtgacagaagcttgatgtgacagccgaataaaaattcataggcttccagcacccttttcgcctcaaacgcggtccgcccccatgccgtaatgccgtgattgcggattaataccgcgcctgattcggtgtctgcatggcgcacgaaactttcggccaatgccgggatgtgcgccggattgtcaatgatcggaacggtcaccgacgcgttttcctcccacaatccgagcgccttaataatctcctgcccctgaaaggtgatttgtttttcatctccgtagagctctgaaatgacattattattaacggtatggacatgcagacagcagcccgcgtctgtctttttgtataagtaagtatggagaagcgtttctgccgagggttttaaggaatggccggtctcagcgggcctcccgttctcatcgactaagagaaaatcttcgtctgtttcttttcgtttgtctttgccgcttgccgtaacgagaaaagtcagcggcccgtcggatactttaatggaaagatttccgctcgttgccggaaaccagtctctttcagccagctcgcgctttacctcggcaagttcgcgccagcgttcttcttttgcagccatgcctgcacctccccgatgttttcgatgcctgttttcacctcatgaaaatcttgaaaaggcagatgccgaagaccgagttcttcgcattcagtcaaaagataatcccttgcaaagcacatatcggataattttgcagcctcgaggtccgtgaccgaatcaccgatcataatgagaaaattctgctgatcggacagctttcggatcactgacggtttgcagcagccgcattgattcgtgcagccgccgtcacaggcgtgcggccaattgatatgaatatattcattgtcaaaggatgcatgattacagaaaatccgctccttttctacgatgccttccaaaagcggatgcacaaaaaagtccattcccccgcttacgatataaaacgggagatcgtttgaccggacaaacgagacaaaatccaaaaagccgtcccttaatttcgcatccttcaggataaaatcagtcagctcttcttttaagctactcggcagcagcccgaacatccggccgactccttcctgaattgataggcttttagacagaacaccgtcttttaattcaagccactcaggaggcgcgaattctttcatcatactgacaatgttgtcgttcatggtaaccgttccgtcgaaatcacaaataatcagcggtgtgcgggtcatacggcttccacccttccccatttgtctaatgcgagctgaagatctttgcacgacgcggctttttcttcaatcggctgggcttcaagcaccgcatcaatgatagcgcggaacgctttgccgccgccctctgctccgttcggatggccgtgaacgcctccgcccgcatttatgatgtgatcaatgccgaaatcacgcatcaaaaacggcaccatgccgggatgaatgcctgctgacgggacggcaaacgagggatgaaagacatcgtcttttacacattcatcgtgaatcgcaagcgccgactccttcggcagtgcaacagatccgtaaggtgacggaaataaactgaaatcagcgccgcaatagcggttcagcttgccgagcaaaagcgcatgcgataaaccgtaaacgggagatgatgtgaatgcgccgctgactgccggatgcgccataatcggaagcgggatttcaccgtcttccgcaaggctttgcatcacatccaaaccgtaggcgaacacattcagcaagagggcgtccgccccgagctccgccgcgcgtctcgctttatcccgcaattcagcagttctccccgtcaggttcacggcatacagcgttttatgccccgtctcctcccgggtttccttcaggacttgttttccttcaataatgcgggtttcaaacggagccagctcattttcaaagaaaatttcgtcgtctttaataagatccacgccgccgagcgcctgctgtctgagctgttctttaatgtcacggagatcccgtccgatcacccctttaaatatgctcatcaaaagcggtctttcaaattcgcccagcagtttgcggatgccgtatatgccgaacttcggcccgggaagagagcgtttaaacccttcggaaaactcaagatcagtcaattttatttttccgtccagtgacagctttccgaatacagtcgtcaggacggcgggtatgtctcttgagaagttcgcctcaggataggcgatggtgatgacggcctgtttttcgttttccggggttccttctttctcctcaacttttacgacccggcctttatgctttctgagctgttcctgcttcacaaggggcagatctgtccaggaacctaccgtcagccccgctgcaatctgttccgcccgcttttcactgtctgttgtgtccgtcagaagatatgttgccaatacttcgctcatgcgtgaacgcctctctttctttcgaaaaacataaaaaaacctcttccgtatgagcagaaagaggcttcgtgttatgtccgaatcttatctctcagctcctgctgcaagaattagcaccgtgctttaacagtcggttgccgggcttcatcgggctcgtccctctgcctgctcttgataagaataatgattttataaagtattttgaattatcgcattgttattttgatatgtcaatgctttttcgggtgaaaagattgagtttcccgatccgttccgcagcctctttaagtctttcttcacttgtcagaagaccgactctgatatagccctccccccattttccgaacccgtttccggctgcgaccgcgacatttgctttttccagcagcagatctgaaaacgactgtgatgtataaccgtccggcaccgggagccatgcaaaaaaagagcccgcgggagccgtgacatcccagccgatatcgcggcatgctgcaatccatgcatttcgtctcgactcatatctgtcattttgcgctgcgacgcacgcctgatcagctaaaagagctgctgccgccgcctgctgcgcggcgggaaacaggctgacaaacatatgatcctgataaaggttgatcgcttcgataacagacgcgtttccggcggcaaatccgacacgccagcccgccatgttataagtttttgacaaggtatagatttcaattcctgtctcttttgcaccttccgtctgcaaaaagctcagcggtttatgcccgtcgtagccgactgctccgtatgcgaaatcatgtacgacacaaatgccgttttgttttgcaaagctgaccgtttcctcaaaaaacgcctctgtcgccacagcaccggtcggattattcggataattgagatacagcagcttcgcctcattctgcaccttttcaggaattgcgctgtaatcagggagaaaccctctatcttccgtcagcggcatcatttccattttcgctttcgcaagggcgacacccgaccagtaatcaggatatccgggatcaggcacaagaattgtatctcccgggttcaaaagacattgcggaagctctacaagtcccgccttgcctccgaacagcacggccacttccgtttccggatcaagcgtaaccccgtactccctttcataaaattcagcggctgcttttttgaagctgtaagcgccccggaaggatgagtatttatgattttccggcctttcgacggcgcgcttcatttcctcaacgatatgctgaggcgtcggttgatcggggttcccctgtcccaaattgatgacgtctttgccttctttcagcttttgattcactttttgcaccaatgatgcgaaaaattgttccggcagctgtttgagtacatcagagatttcaaagttcatattttcaccttctaaaaatttcttgaaatgatagtccatcatcatatatggttaaataaaaaaagtaaagagaaacttggggtgttgaaaaaatgaaatggaccgtttcttgtttgcaatttgatatttcatacggaaatccttcagaaaacttcaaaaaagcagaatctttgattgagcaagaaagccgccgcgctgatgtcatcgtgcttcctgagttatggacgaccggctatgacctcacacggcttgaccagctggcggatgaaaacggcgaaacctcggtacaatggcttaaaaaaacggccaaaagatacaatgtacacctcgttgccggatctgtcgcggtcaaagaaggagaaaatgtctataacaccatgtacatcgccgataacagcggacagatcgtgaagcagtatcagaaagcccatctgtttcagctgatggatgaacatctatatctgtcagcaggaaacagcgacggttcctttgagcttgacggtgtcaagtgtgccgggctgatctgctatgatatccgtttccccgaatggatcagaaagcatacgtccaagggagcaaatgtactctttatctctgcggaatggccgttgccccgcctcgatcattggcgaagcctgcttatcgccagagcaattgaaaaccaatgttttgtcgccgcctgcaactgcacgggatccaatcccgataatgaatttgccggccatagcctgataattgacccatggggccggattttggccgaaggagaccggacggaaggcgcagtcccagcggaaatcgatgtttcagaaagtgaggccgtgcgcggcaccataccggttttccaagatttgcggcgtgatttatattaattttcaaaaaaacgttgacaagaatattccgcacctgctaatattttcatcaactgattaatccgaattgtgatacaaatcaatatatttttctcttatcgagagttgggcgagggaatcggccttttgaccccaacagcaaccgaccgtaattccattgtgaaatggggcgcgtacattttgcgccgagacattgtctcataaggcacggtgctaattccatcagatgttatctgagagataagaggcggactgcactgtttcagcctccttctctttcagagaaggaggctttttttcgggcgtattctccgtcacgatctcttacagccactacataataggagggtaaatccatgtctgcaactaaaacaagtctttatgaacaattaacagaaagctccgccgccgcgctagccgtgaagctcggcttgttccaaagcaaaagcaccctgacatgccgtgaaatcggcgacggcaatttgaattacgtctttcatgtgtacgataaagaaaacaaaaagggactgattatcaagcaggcgattccttacgccaaagtcgtcggtgaaagctggccgcttacgatcgatcgggcgagaatcgaaagcagcgccctcatccgccagggcgagcatgtgccgcacctcgttccggccgtttactattccgatactgaaatggccgtcacggtaatggaagacctctcgcatttaaagatctcaagaaaagggctgctggaaggaaaacattatccgaacttatcggcccatatcggtgaatttttaggaaaaacgctgttttactcatccgcttatgcgcttgatgcgaaagtaaagcagcagctcgcaaagcagtttacaaatcctgagctttgcaatatcacagaaagacttgtgtttacagaaccgtttctcgatcatgaaacaaatgatttcgaagaggagctgcgcccatacgcagaaaaaatttggaacaattcccggctgaaagaaggcgccgatgaattgaaagccatctttctgaattcagcggaaacattgattcacggcgatctgcacacgggaagcatcttcgctgatgaacatgaaacaaaagtcattgatcccgaatttgctttcttcggaccgatcggctttgacatcggccaatttatcgccaacctgctgttaaacgccctcagccgggacggtgacgacagacagccgttatatgaccatactgccgccgtatgggacacatttgtgaaaacattcagtgaagcttgggagaaagacagcttgccttcctgcagacatctgctggaagatacactgaaaaacacgtttgaggaagcggtcggttttgcgggatgcgaattgattcggcgcacgatcggactcgcccatgtagctgacttagatgaactcactccgtttgacaaacgaattgaacggaaaaagctggcgcttgaaatcggcgcctgttatatcgaaaacagaaaagaactgaaggatatcactgaggttctggaacaatttaagctccgtgtaaaggaatgatgcagcatgaccaatgaatttgccatcccccgttctgtggaatggaaagaaacatacatccgcattttaaatcagcaaaagctccctgacgttactgaatatgtggatcttgaaacaaaggaagatgtattcgacgcgattatcacactgaaagtaaggggcgctccggccatcggtataacggcggcgttcggactcgcgctctctgccaaatcgtttgaagtccgcgatctttctgatttccgccgtcagctcgcggatgtcaaagcgtatttaaacagctcgagaccgactgccgtcaacctcgcgtgggcgcttgacagactgacggactccatcagagatgcgacctcaatcaatgaagcgaagacaacgctcgttcatgaagccattcagattcagattgaggatgaagaaacatgccggatgatcggccaaaatgctctgcaactttttaaaaaaggcgataagatcatgactatctgcaatgcaggttcaattgccacaagcaggtacggtacggcgcttgcccccttttacttagcgaaacaaaaagacctcggtcttcatatttacgcttgtgaaacaaggcccgttctccaggggtcccggctgacggcgtgggagctgatgcagggcgggattgatgtcacgctcattactgacagcatggccgcccacacaatgaaggaaaagcacatttcagcggtcattgtcggcgctgacagaattgctaaaaacggggatacggccaacaagatcggaacgtatggcctcgctattttggcaaacgcctttcaaattccgttttttgtggccgcaccgctttcgtcttttgacttacagattgaaaacggcgatcagattcctattgaagaaagagatccggatgaagtcagacagatctccggcatacgcaccgctcctgaagatgtgccggtcttcaatcctgccttcgatattacaccgagcagcctgatttcaggcattataaccgagaaaggcatcgtgactgattcttacacggaagaaattgaacaattatttgcagactgccagctgagctgaaaaaccgctgatgatattgcctcaggcaatgtcagcggtttttttgtctgcataatgtaatcacttcatctttttgggcggctgaaatcagatgcattttaaaaaacagctctgcatagccggctatcttttgcggacggctcactctcatcaggcttcgtcctcctttttcgtaagaccaacttttttcacttaataaaatgatatgtcggacgtgaaaaaacggaacgtgccatatgctttatttttctttataggatatttgttcgatgttcagcagcaccgcttttacatccgtctgggtgcccgcgtaacccgttaaggcgctgtttttgccgattacccgatggcacggaatcaaaatcggcagcctgttgcgtttattggcttgtccgatggcgcgcaccgctttcggtttgccgatcatttcggctatatcaccgtagctccgggattcgccgtatggaatcaccgtcagcgcgttccataccttttcctgaaaagctgtccctttttgtctcagaggcagagagaaatgccttctttctccggaaaaataagaggtcagctgctgtttcgcctcagatagcaaagcggtttcacacgatttcacgccgggcgtatctttccgccatttctcaaaatcttccccgttgagaaacaggccggtaataaagccctcttcctctgttatgatgacggttccaaaaggtgccttcacacttgtaaaacagatcattcgccgctccttctttcttcagtattctgccggatcggaagcgtcaaatgaaagacggtgcccttcccttcttcactctccacatgaatgcggccctggtgctcttcgatgattttatagctgaccatcagaccgagccccgttcccctgtcttttgtcgtgtaaaatggttcgccaagacgttttaatttgtcttcggacatgcctgttccttcatcttgaagagaaatcagaatatggtctttatcagaaggctgaatggtcacgtagatattgccgccgcccggcatgacttcaatggcgttttttaaaatattgataaacacctgttttaattgattcggctcacagtaaatcggcgggatgtttccggtcaggttcaaatggatctgcacattgacaagattggcttgggcattcaagagatcggccgtgtctttcataatctgcgtcacgtctttttcttcatataatatcgcctgaggtttcgctaaaattaaaaattcagtgatgatagactcgatgcgttttaattctgaggtaatgacgttaaagtacagggaatgttctccttcaatgcttccttgcaaaagctgaatgaaccctttcagcgccgtcatcggatttctgatttcgtggacgatgccggccgcaagctcacctacgacgtgaagagtgtctgatttccgcagccgctcctcaagctctttggcctcggtgacatctttaaaaatggccagattcatattttgaatgatattccttttgaaggagaattccagtttgcggctgtcactgctgcttaacaggaaggggatttcattatccattccttctaaatcaatctttctggcgggcacacccgcgttttcaatatcaaataatgaaagaatatccggaacggtgtacgctctcagctcctcatccggcatgccgaggatacggcttgcgagagggtttgcgtcaataatgcggaattggttgtcaaacaagactttgccgtccattgagccgttgaatacttttctgaatttcagctcgctttccctcaattctttttccatccgctttcgatcgctgacatttcttaaaatggttaaatgctgaccttcaagtatggttcgttttgatgtgaattcaagctctttatattggccgtttgccatctgaaacagcatctcttcacggatttccccgtatttttcatattttttcttaatctgtttgtattttttctgcggatcaacgataaacgaacataaattccgttccaccagcttatccatcggcagttcaaaaatacggcacgccgactcgtttgctttggcaatccttccgtcatcagaccaaatgacaatcgcgtccatagcgttttcaaagatttcgcggaaacgctcttcgcttttaaagagtttcaattccatcgaccgtttctccgttatgtccctcataatggacatgtaaaacccgctgatcaagttggacgtaatcgtaaattcaaacagcttctcctcgccggaccggagcttgaccggcagctctcctttagcttttccttttttgccgagggtgtcccagatttctttcaggtgcttgttgttttctccttctgtaaaatggcggagcgacagatgggacagttcattctgaccgatctcaaagcttttgcaaaaagagaggttcgcatcaataaacccgccgtccttgtcaaacaggacgatgccatcgacagctctgtcaaacagatctttaaacagctgctcgttcatggaaaattcacgctctagtatttttttagaggagatatccctcatcaccacaaaaaaataatcctccccaattccgtctttggcgaggaattcaatgtatttcgtcgcgccgctgtcaagcttaatcggcacctctttccacagatggccctttttcaaaaattttttcacggccttattcagttcttcctgaggcacagaatataaaaagtccaggacggagcggtttatgaggctctctgcctcaatctgcatcatccgggcggcagcctcgttcgcctggacgattttcatttccttatggcatataaaaatggcatcaagcgtgttattcataatcacatgataccgatgcaaatcactcttcaggcggtcattttcctccttcatccgcttcagctgctctttcagcgactcctttgtttgcaaatccagagtttcagccattcagtacactccttcttcaaaaacctatccttcaatatttctacaaaatacctcatcttccttcattcgccctatacatttcagaaaatttcaatgatatgacaagttaaagtctttttctacgatccttacctccccattacatcatcctaacaatcccttttgtcctccttcaattttttgttttttattttaaaatgaacatcatcaggaaataatcatgcagtggatgattttttgaaaagaaggtgatgctatgacaaaatcgcgagacagttactttgacaacgccaagtttatcttgatttttctggtggtgttcggccacattctccggtcttttattaacggaaatgagtttatgcttcatctctacaaattcatttatacttttcatatgccggcctttatcctggtttccggctatttcgctaaaaactttaagcggaaaggttatgtgaaaaagctggctgtgaagctgattattccgtacctgatttttcagggcatctactcggttttttactacttgattcaggatgaaagcatgacaagcgtcaatccgattgatccgcagtggtctctctggtttttagtcagcttattcttttggaatctgctgctgtacccttttacgaagctgccaaaaatgtgggcgcttggagcgagctgcgggcttgccgttatgatcgggtatctggatttcatcagcagcacgctgagtctctcacgaacgtttgtctttcttccgatgtttctcgtcgggttctatttgaaaaaacagcactttgatttactgcgtgccaaaagaggcaggcagattgccgccggcgtactcgggattgttttcctcttatgctggtgcattgattttgattactcgtggctgttcgggtcggagccttattccacattcggcacagtgacgctgttgagcggtctgtcgcgcatcggctggtatgtattggcctttgccgccacattcagctttttggcgctcgttccgcaaaagcgttatttctttacgaagtggggtacgaggacgttttacgtgtatctgctgcatggattcatcataaaaacgctgcgccagatcgggcttgaagatcacctgtctgattaccagaatttagtcatgctcttgattttaacggccgctcttacttccattctctccagcaatgcggtgaaaacggccgcacagccgtttattgaactgcggataaccggctggcttgaagcggtgaaaggaacaagaaacggtgtttattcgaaataataaaaaatacctcttaagcgatatcgcctaagaggtattttttattttttgctgtcttctttcttcttgggtttcgtctgttcaagcgtttcaatcagttttccggcgttataatcaccaagctcgcttgaaaattcttcttcaagcaattcagggtccatcggctttttatggttttgcatgtctctactgtggcgattttttttcgtcatgttattcgcctccttgtttgccgtgttttgatttgcggtttgcgcctctcagtccgggatcaccgtcatattgcgttttgtatgcatctttgtccatgctctcagtcggtgtattgttattggtcaaagcttcattcttcgctgctttgcgtttcatttgatttcctccttctgtcagcaaatctgttttgaattcatcaagcatttttttcaggtcgcgcactgtcacgtttttggcatcatcaataagctcatagccgatctgtccgttcggctcaagcaacacatatttaaaatcttgtatatccccgaggccttcctgcctgatccgcattgacagctgcgcctcggtgaaacgcatcttttttaaattttccggtatgatttttccgtctctgacaacggcgatggtttttcctgaaaataaaacctcaaaaaagtttgatttgatttctaaatattccatcaggatcagtactgcaataaaaatcgcagccgcgaaaatggtttcccataaactatgttcaataaacggctgaataataattgagccgatggaaatcatgatgactgtctgggtcaccgacagctggctgatcgatttccgcccggcaattcgcaataaaaaggtaccgaccgctatcataatcacagatttccagaatacggcaaacaatgacgtcacctctttacaaatagaatctccaaaaaaactgctgccacacatccattttccggaaataaaaaacaccgcttttaaaaaagcggtgtcagccgattataattctttccttcggatagtgataattcgcttcgatttcctttcggccgattaaataaaggaaagtcagaatgccgatccggccgataaacatgacgatcatgatcacgcattttccgatatcgcttaaatgcggggtaatcccaagcgaaagcccggtcgttccgaaagcggagcaaacttcaaaaagcagtccgagcagcgtctgattcttctccgtcacagccagaatcagcgtcgatccgaacacaagcagaatcgccatcatcgtaacgaccagcgatttcatgacatcagcctgatgaagctcgcgtttaaagaccttgaccgctttattcccccgggcaaaatgaaacagagcaagaaggttaagcgcaaatgtcgtggtgcggattccgccgccgactgagctcggcgatgcgccgatgaacataagggcgcacatgaaaaatagtgtcggcgccgacagctgactgatatcaattgtcgcaagcccgccgcttcttgtagcggttgattgaaagagacataaaaacaaaacatcatgccagctttttcccttcatggcatggcttgcttcaagcgcgtaaattccgacggccccgaacaaaacgagcattccgaacgtaacggtcgtaattttcgtaaacagcgtaaatgagtatctgcgctgttttgaaaacaaaaagtccttaacttctacgagcaccggaaacccgatcgcaccgaaaataatcagaagcatcgtaataaactgcacgaaatagtcatgcctgaacggaacgagtgaatttcccgtaatatcaaaaccgccgtttgtcgtggcgctgacactcgcaaagaatccgtgcaagtaagcttgttcaaacgaatggtaatacgttaaaaaatatgttcctaaaatgatgccgcccaaaaactcgattaataaaatcaaaaacaggacttgcttcatcaagttgacgattccggaaaactgcgattgattctgatccaccataatgagcttccgttcccgcagaccgatccgtttgcgcataatcagccagacgaatgttccgagcgtcatgatgccgattccgccgaattgcagcacgaatgccaaaatgacaatcccggtcgtgctgaatgtatcagccgtgttgaccaccgttaaacccgttacactgactgagctgacagctgtaaacagcgcgtctataaacgaccagctggccccttgtttgtgggctgccggcagacttaacaatataactgccaccgtcacagcaagaaaataatataatgcaatcagctgtgcaggcgacaagatctgtatgaatttcttcagcattaatttcataagataattccttttgcctctcattgtagtacgtaattattctaatgatattgggagaatttttaaaggtctttttagaaagattttttatttaccttatgtaatttgccgatctttaatcaaaaaacctctgaaccaatgtcagaggttttgttgattatttggcttcaagcctgcggatgcgctcatccagatcagggtgtgtagagaacagtgacgaatgctttttgccattgatttttaacgtctgcaccgccgtctgatcctcttcattcacgtgtcctgtgtaagacttcagcgtacgcagggcgtgaatcattttatccttgccggcaaggtcggcaccgccgcggtcagcgtggaactctctgtgacgcgagtatgcgaagacgacaagactgccgagaatggaaaaaataatctgaaacacgatcatcgcgataaaatgcacgaccggcgcgaggtcttctttgacaaagcggcttgcaatccatgccgcgatacgggaaaggaagacgacgaacgtattgacgattccctgcagcagcgtcatcgtgaccatgtcaccgtttgtaatgtgtgcgacttcatgggcaagaaccccttccaccgcagcatcatccatctgctgcaataaacctgaggaaaccgcgacaagtgagcggcgcttagaaggcccggtcgcaaaggcattgacctcaggggaatgataaataccgacttcaggcattttcgtcatccctgcagtacgggccagtctgtgcacccggtcaaccaattgctgctcttcaaagctgagtgactgtttcttcggatttaacacccggacacccatcatcgttttggccatccatctggacattccgagagaaataaaagaaccgacaaaaccgacgacaagactgaacacgagcaatgccgtcagatcgacgcggccattttgtatatacgagccgacaccggtgacgcttgtaataatcgtaagcacaattccgattgtcgtaatgaccaaaaggtttgttaaaataaacagaaatattcttttcgccataattacctccgtcttttttaagatcaaaagaacttatttaattaaattataaatgatctgtttgaaaatgcaacaatttcgacgtatgatgttaatgtaattctcagtgatacaagaaagtgaacacgtaatcaatcagaggtgaacaatgaacacgtttaaactgacccgaactgatatggtccggcttctttacgcgttaaagggccaaggagacgcaacccctctccaaatcttattgcaatctgcggatatgacattggatgaagcggaaaaccggctgcatatccctgaatttctgacgagattcgagcgaaaaaaagagaaaaaagaatacggactttcaacaaacgagattgtcgaactgggaaatctgtgcgagctgacgtctttaaaatcaaccgccgtccaaaactgggtgaaacgcgatattaaagatttgatcggccaccccttactcggaaaaaaatatacaattgaacaagctgtcatccttctcattgtacgtgatttaaaatcaatttatgacttcgaacatatacgcggcatactgaagatcgcatttaacacgatcaccgacagaacagatgacgtcatcagcccgatcagctactatgagagctgcgctcaggtgattgattatctccatcataagggcaacccgccgatgaaggaaacgagcctgcaggagctcgttgaacagcagacggacaagctcagaggctgcttcaaagaactcggaaacgggcaatggaacaatatcagatccatactcgccgttacggtgctctccgttttgactttccatattcaagcctccgcctacaaaatgaccagccatttattataattcataacgttcttagccccggtgtctgcgccggggtttttttcagctgcacaacaattgccagcataatcaataccgttccgtttgaaactaaaatgcgtaaaacatcttgccagagaaaaggagatgaaaaagatggcgagcagaaataaactcttagttccaggggctgagcaggcacttgaccaatttaaatacgaagtggctcaagaattcggcgtgaaccttagctctgatacagcagcacgcgcaaacggctctgtaggcggggaaatgacaaaacggcttgtacagcaggctcaatcacaattaaacggcaaaactcaataatgtagcttattcgccgggatttctcggcgaattttgatatttatcggcattttcccttccgtgccggtagccgttcgggttcctgcggtctgacgaatcttcatggcgccgataggattcccgctgttcattgcgctcatgatcccgctgattccagtaatgattgttatacctatgcttgggctctttgtcgtttccgttttcctgaggattttgtgttgggggctgctctttttccccatcttgttccttctgagtgttttcctctgatccggaagctgcatttttttcggtttgctgattgccgtcctgactgtccggcttcgcttcttccgtgccgggcgttgtttcattgttttccggctggtccgctgccttttcttcatcaggagatgtctgctcatcagccgccggcttttctgtgtccggctgcatgttttgatcagtatctgtttcattgtttttctgatcggtttcttggccgtctgttttcttttcaggctgttcttcttctgttttcttttcgtttcttcttatgtagctgcctgttgacataccttcctgtttcgctttttctcttgtttccatatctgattcaagcgattgaagctggtaggtgcccttatatttttcagtcatatcagccagctgttttttgacgccttttttatatgtattgtcatctgtattttcataaaccgtggaaattaaaatctcttttgattcctttacatatccatgcttgctgcaatcggtaataatatcactgatgacttccttaaaatcgctgcttttccagtctccgatgtcattaatgacctgtttggcgtcatggttcagcggcgtaagttcaatgacttcatatttgctgtttaaagccatctcaatgcttggattaatgtccagcgtcatatacgcgtaagctttgttatcagaaaaaaccgggagcatgattaaaataaataagataatagcagtcatcgtaaacactcccaatttaaaagggcgcagtttcagaaaatcaaaaaagctggcccttcttcccatacgcgtttcgccttcaaacgtaatttcctctccgatttcacaagtgcggtgatcattttttgtttttaaaaattgtccgtcaggggttagcaacgtgacgaattttttatttttctctactatgatccctcttctcatgagtgcaacacccctttaagataatcttttaaataaatataatcaccggtaataataatactcatggcgatgatatattttcggttccgttcgatcgtttttctgctgaccgacacgagctgctccagctgtttgacaggaagctgtttcttctggtgcaaaatggacgccagctcttcattttcaacaagcgtgtaagctaccttaatcgcattctgcctcgcatctgtatgcttcggcgattgttccagcaactctttaaaagacagcccgtattctttcagctgcttttgaaaaaaaagaatttcttcccggcgctgctcctgttctatctgtttgcggtattcatcaatggaaagctctgcttcgataagactctgcgaagactcctggtcgtcgccttcctgcacatccatattaatgtgctgagcggttcttgcttcttttctgatataatctattacttttctttttatgataagctctgcaaatgcaagcagcgaattacctttttcagccgaatatttttcaatggcttcgttaaacgcgatcagcccgatgctgaattcgtcgtctttttcatctatatatcgtttacaaacggatgaaaccgtctttgcgataaaaggcttatattgctgtattaaatcgttctgcagatctttgtcgcctttttgtattttttcaacagatgtttcaagcgtttgcttcttttttcccaatttaaacaaaaggctaagcactggtttcacctcagttcctccctataactactcataatcatagctaatttagtagggattcgcaaaggaagaaaaagagaaatcgatttcatttgtctcaattatgacaagccaataagacgtactatacatgatttcgtgccttcaagcagaattaagggggttttctgtgtgttttttgtaacaatgctgttataaaattgttatcatatgtcttaaatgtaagcgtttcaaacaaaaaaaggaacctgttttttaaaaaaacagatccctctatgaccctttttatgcgtgttctctttctgcggatgccgcatccgtctctatttgttttgctcctgacataaaccatccgcataccgcaatggctgccagaaccgcccagaaaatcattttccaggccgccgaatggatcacatctgctggaactatgccgagttcctcatgggccagagtataaagagcgagtttcacgcctacccacccgacaataacaaatgccgccgtttcaaggcccggcctcgtttttaataaagaaacgaacattgatgccgcgaagcgcataatgattaaaccaataacgccgccggctaaaatgacgagaaactgaccgccgtccaagccgccgatggcaggaagcggtgttcccggaagcgttactgcaagcgcgaccgccgctaaaatggaatcaacggcaaaagcaatgtccgccagctccactttcaatacagtctgccaaaaaccgctttctttctgtttcttctgccctgtgttatgtttgaatacataccgcttcagcaaatggctgactgcgatgtaaaacaaatatagggcgccgacggcctgaacctgccaaacattcaccaagaaagaaatagcgaacagcgacccgaaacgtaaaataaaagcccccgccaaaccgtaaaataaagccttcttcctttgtttttccgggagatgcttcaccatcacagccatcaccagcgcgttatccgccgctaaaatcccttccagcccgattaaaacgagaagaacccatccatactccaataataatgataagtccaatccaatccctccgtctcttttctgtcatccgagcttataccggcggtttttttacgcaaaaaagacctttgccgatataaggcaaaggtcttgctagacatgaatcattggcatgccaacaaagccgatggatatgatccatgaattgacgactttgtttccggaagatccggacgctactcccctttgggatttcaagaaatatttgtttatacgctcatgataaagcctgtttcttcatttgtcaacgcttaacttttttaacaaattgagaaatattttctgttttgacccgctgctttcttctctttaaaacgatataagagacgagaagcaccgcaatgaatatacccagcgggagcatatattgatcaagaatggacccgacgtttttccaattttccccgagtttcattccgaggtatacgtaagcaaacgtaatcggaagcatcgctgcatatgtataaagggagaacacccagacattcatcttcgcaatgccgcacggcaaagaaatcagcgtcctgatccccggtataaaacggccgctgaacgctaccaaacctccgtgcttctgaaagaaatcgtctgatttctgcagggtttcgggtttgatccatatatactttccgtacttcagcaaaaacggccgaccgcccagcctgccgattccatataaaacaagcgggcctgaaacaccgccgagcgagccggcaaacacggctccggcaagcgtcatatccccttttgacacccagtagcccgcaagcggaagaacaatttccgcgggaatgaattctatactgagcgccaaaaaaattcctgtgtaggataagcttttaaacgcctctattattgatatgataaaaccttcgatgatgtatcactcccgacataagtctatattccgaaacttaagaatgattttaacacaaaatcttgaagctgaaatattttttagacatgccgatataaatgtaagttgtttcacggtttagtaggaggaatcatctttggaattacatgtatattacaatcttccgcttgtcgggttatccattctgattgcttgtctggcggcgtttacttcacttgaaatctccagaaaagtaacgctgaaaacggggattcgcagtaaactgtggctgatcgccggttcagttatcatgggtttcggcatatggtcaacgcattttgtcgggatgctcgccgtttatgtgaacatgcatatgaattatgaagccgtaccgatggtctcttctttaggcgccgcgatttccgggtctttcgcggctttatatatcgtcagccgaagaatcttaacactcaaccggctgattaccggatctgtttttatgggagcgggaatttcacttatgcattacatgggaatgtcggccatttcccgggtaatgattatgtataatccttttttattctgtttctctattttgattgccattgccgcttctttcgtttcgctgaaagtatttttcggtttagcagtgaagaaaccgacagaacatttgacttttcaaaaaatcatcagttctgttttcatgggcgcggccgtctcggggatgcattatacaggtatgatggcagcgtcattttatgcagacacgcgaaggcctagcagcgatatggaaattcattcgtttcatttgtctgtttttattacgctgattatcttttgttttcagatgttattgtttttcagctcacatttcgatcgtcagtttttccgccacgatgaacgtatgaaggatcatgaacagcggtttcaatcattaattaaacataacattgaccccattttcatcctttctcctagtggtaaaattctttactctaatgaagcaggggccgagatgatacacagtttcggactggacagccaaaattggcgcagacatatcagcagtccgctgaagacctatttcaaacaggtaaaaaaagaacagcaggcactgcattttgatgctgatctgaagacagatatcggtttattttatattaatgttacctttattcctgttttggtcgataacggactggacagtgtatatgtcatctgtaaagacatgaccaaacagcggcaagccgagaaggaaattcaccgcatggcgcattatgattctttgaccgaccttccgaaccgccgccatgccgttcagcgattgacggaagttctggaaaagaaacattcgcatgggcatttgaccgttgtgttctttctcgatttaaatcggtttaaagttattaatgatgctctcgggcacaatgtcggagacagacttcttcaatcagcggctgaaagactttcttccatcatcccggataatggttttatcgcccgtcttggcggcgatgaatttattattattttaacggatgcccggtctgaggacgatgacattgatgatttagcaaaacagatcatcatgcagttcgaaaaaccgtttatcgttcaggagcatgagctgatcacctccgtcagcatcggcatcgccgtctctccaaaagacgggtcggacgggatggaactgatgaaaaaagccgatatggcgatgtacgccagcaaagaccgaaacaaaagcaaatacaaatattactctgcccaaatcggagaaaaagaagcgaaaaagctccggattgagatggaattgagagaagcaattgagaaaaaaaggtttgtccttcattatcagcctcaatacagctccgccgatcagctcataacaggagttgaagcgcttctgagagttgccggcgcagatggaaaactgcagaaccccggagactttatacaggccgccgaagaaaccggcctgattatcgacctcggcaaatggatcattaccgaggcgtgccggcaggcgaaggaatggcacgaaaaaggttaccatcttcctgtcgccattaatatttcggctaaacaatttcagtcggaagaacttgtcccgtttattcagaaaacacttacccattacaagcttcctcccgcactgcttgaagcagaagtgaccgaaagcatgacgatggaagaccgcgagcacagcaaaaaagtgctaacggcgctaactgagctgggaatcagtgtaagtattgatgatttcgggacgggccatagttctctcagttacctaaaggactttccgattcatagattgaaaatcgataaatcatttatagatgatctccagctgcatcctaaatccgcgcagatcacaggcgcaataattgccatgggacatcagctttctcttttagtcgttgctgaaggggttgaaacggcgatgcaaaaaaagcttttagatgaaaaagggtgcgattttcttcaaggattctatttcagcaggccattgccgcctgaggagattgaagagctgctccatgaagcgccgcgccacccataagttgctacacatggaacggacccgtttatccacaataaagacaaaaaggagtttttattcatgcacacgatgtggaagggttcgatcagcttcggcctcgtcaatatcccggtcaagctctttgcggccactgaagataaagatataaaattccgcagtcttcataaagaagaccatgcgccgattaaatacgaaaaaatctgtaccggatgtgaaaagagtctggagcctggtgaaatcgttaaaggctatgagtatgtaaagggaaaatacgtcattttgacagacgaggacctgaaagacgtaaaacaggaacatgaagagaaagcggttgaaattgttgactttgtccagctgcaagaaattgatccgatttattttaaccggtcttattatgtcgggccgggagataacggcacaaaagcctatacacttttgcgggaagcgctgaggacgacaggtaaaatcgggattgcctctattacgatccgttctaagcagcagcttgcgattcttcgcgtgtatgacaactgtatcgtgatggagtccattcattatccggatgaagtcagaaacgccggacatgtgccgggagttcccgagcagacggccgtgaatgaaaaagaattgcagacggcgattacgttaataaacgagctgacaaccgagtttgacccagagcaatacgaagacacataccggaaagccctcctcgccaaaattaatgataagctcgaacatgaagaagcaggcgtgacaccggctgctcccggtccgcgcgaagatgtcattgaccttgtcagcgccctgcaggcgagcattgaccggacgaagcggccgaatcgcgagcaggctgcaccggtgcggacaaaagacactgcgtccgcaggcggcgaagggaaaaaacggaaaacgaccagacaaaaagccggaacgtcttaattatggtgctgacgatgcagccgattctgacctctgcaccgcccacaggcagtgagtggcgctatgaggtaaagtatgacggattccgctgtcttctccgcatagacgaaagcggtgtcacattaaccagcagaaacggccagacgctgacgaatcaatttccggaaatcacagcctttgccgtcctgtgttttcagcacatgaaagacaggttccccattacgcttgacggtgagcttgtttatttagtgaatccgtacagagcggactttgagcacattcaaatccgcggacgtttaaaacgggcggaagccattgaaaatatcgccaataaacggccgtgccgctttctggcatttgatctcttggttctgaaaggcgccgcgacagtctcattgccctatgtgaaacggaagcacgcccttttcaaactgtttgaagaagcaaatcttcctttaagcccccgtcacttagcggaagaagcgattcaatacattccggagcacactgactttgaagcgctctgggacaaggtcgtccggtatgacggagaaggcatagtagcaaaaagggtatcgagcggctgggcggaaaataaacggtctcccgactggcagaagtacaaacatatgaaaacggcacatgtgctgttaaccggattcaatccgaaaaacgggtatgtgacggcctcggttttaaaagacggcaccgccgttcctgtcgcatccgtttcccacggcatgcaggctgaggaaaaaaacgccgtcagaaccattatggagacccacggaaaaaaactgaaaaacggcgagtattcactagagccctccatctgcatgaccgtgcaatatttaaccatattgcaggacaccctgcgcgaagtatcttttgtttcctttcagtttgggatggattggactgaatgcacttatcagcagctaatcctccgatctaaaacgctgccaccagagctgcagttcacaagcctggataaggtcgtttttaagaagcgtgaaaaaacgaaagaagatttcctttgttatatggtgaagatgagcgatgttcttttgccctttcttaaagaccgggctgtcacagtaatccgatatccacacggggcgccgggcgagtctttttttcaaaaaaacaagccggactacacgccggactttgtctcaagcgtgtttgacggaagccatgagcacatcgtgtgcaacagcataccgtctcttttatggctggccaatcagctggcgctggaatttcacgttccttttcagacagtccattctaaaaggcccgcagaaatcgtcattgaccttgatccgccgtcaaggaatgatttccctatggctgtggaggcggcgcatgtgctgaaagagctgtttgactcattcagcattacatcatttccgaagctttccggaaataaaggcattcagctctacatcccgctttcaccggaagcattcacctacgaagagacccgcgcgttcacaatgctcattgctgattattgcgtccggacgcgcccggatctatttacgacagagcggtttatcaaaaaccgaaacggcaggctctaccttgattatttgcagcatgctgaaggaaaaacgattatcgccccctattcgacccggggcaacgaattgggaacggttgccgcccccctttattggaacgaagtcaattcctctttaacacctgatgattatacgattgatacagtcgtgaatcgcgtcagaacagagggagatccgttttatgagttttaccgcaatccgcaggacggcccgctttcaatcgtgcttgagcaaatcaagagaaagagctgacgcttttcgtcagctcttttccgtctgatacgtgcacatcagtttttctttggaaatgaataaataacaggaataaggaatgtttttgagggtgagctgcttcgcagtaaaatataaaatcgggatatgggcagctttcttaaacagcctgtagcagccgctggacggcgttatcacatcaaacccgagtcttgccgcccctttatgaagcattgtaatgccgacgacgccttttatctcgtctttccgtttatgctggttaatataatccgctaaatgaggcatggattgataaactttctgatatagcataatcccccttctgaccgcgctttcaataggctgcagctctttcaggagtttgacattatggagatgaatcttcactaacacgtcattttttttaattctcgttccgtcgctcaggacgacttcttttcctttatatcttgtcaaacggacgcggaatacatttgattgccgtttatcaatcagcgtcagccgggtaaagaaaaaataaagcggatcaagtaagtaccatatagtcagcagacagcttctcacacgttcaccttctttatattcaaagcaccttcatattttggcatggggcatatcacattatgattggtaaataatgatgccgccctgtatcagcatatgcaaaaacggcttcaggctctaccgtcgggacagaaaaaaacactctccctgaagaagagtgttgtatccgctttcttttaacggaaaagcaaatgctggctgtgaattcccgcttttttcagtaaggctatcagctgttcctgttcatcaggcataagtcctgaaaacgctctcgcaattctcaatgaatgaatcggataaattttgtccaaatactcgtttcctttatcagttaaatgggcgtaaacagaacgtttgtccttcgggtcttgttctctgaccaaaaacccgtttctttcgagcttgtcgatgacataggtgacatttccgctgacaagcaaaagacgcgagccgatttgctgaagcttttgcggacctctcgtatacagcagctccaaaacggcaaattcagtcggattaaaaccgtgttctttactgtcgcggatgctgtgttcagacacactcttgaaagcccttgcaaaaactttgtacaaattcatcgcacgcatcacttcttcttcattaaatgataatctcatcatatctaccccgtatttaagatttttataaaaaaataatgtaaacccttacaattcataagagtcgttctctgttttatattctattcgtgccgtttttcagaattccttcttttttatataaaaaaatacccttatacatcatttaatttgtataagggttacgttctttatagggaatgttccggaaaaaatacgcatattcctttctcagctctgtgattgtcatggaattcagtatttctttcgtatagactccgatctgaagaagcttttcggaataatggtttctctctctgtccagtgcattttgaagcaaatgactcatgacggcctcctttgttttccgttattctatgatcagaataacgcttttatttcaatgacgtatgaagccattgtaaaacttgtgtggaattatgatgtttttcggtaaagtccgttctggacggctctgagcagcggaaaagcgtgttccccggcaagctgcataaacgtctccagcatttcatcgcgtttcctatctaattcaatgatttcttttgccagcgaaaccgctttttctttctccattcatatccttcctctcattgtatctgtaaagtaagcataaaacgggatacagagccatgcattaaccttgttaatttttctgacgctttttttctaaaatcttctatttcacgtcagaaaacctgacaagcgtcaggttttttctctttttttcttatataatatgagtaaaagacatccaggggtggaaaaatgacgacagacgaacaatcttacaaagataaaaaagtaatctcgatcggcattgtaagcgaattaaccggattgtcagtcaggcagatcagatactatgaagaacggaaattgatctacccgcagcgctcatcgcggggaacgagaaagtattccttttcggacgttgagcggctgatggatattgcaaacaagcgggaagacggcgtacagacggctgagattttaaaagacatgcgaaaaaaagagcaggccctcaaaaacgacccgcagctccgcaaaaaaatgctggaaggacagcttaatgcccattttaaatataaaaaccgctgacaaaaaaagtccgcctcttgtgagacggacctttttttataaagcatgaagaaatgcagtggcaatgccgaaataaattaataaggacaaaatatcgttcagcgtcgtaatcagcggcccggatgcaatcgccgggtcaatgttcagtttatgaagaataatagggacgatcgttccggccatcgtaccgataatcaatgtggcaagcagcgatgaaccgacgacaaaaccgagagttaagtctttctgccagacggatgcgacaatcgtgatcgcgatcgaacagacgatgccgatatagataccggcccttaattcacggaaaatcaatttaaagatggtttttttattcatttcttctttagccaatcccctgatgacgacggcgagtgactgcgtacctgtattccccgtcgttcccgcgatcatcggcatgaaaaatgcgagggcgactactttttgcaatgtatcttcaaagtaattcaggatgcttccggaaatcaatccgataaacaaaagcagaatgagccacggcaagcggcggtacgccgcaacatacgctttcgtatcaaatgtaatcgccttaccggaggcggcgaatttttcgtaatcttcatcggcttctttaataacgacgtcaataatatcatcgacagtgacaataccaacaagcacattattttcttcaacgatgggtatggctaagaagtcataccgctggatcagccgggcgacttcttcctgatcctgaagcactccggctgagatgacacgcgtaaacatgagatcctgcaccttatcttcaggatcgccgagaattaaatctctgtaagaaagcaccccgacaagctgcttgctgtcattaatcacgtacaaatagtttattgattctgcgatttctgcaaagcttttcagcttcacgaccgcatcttttactgtataatgctgcggaatccagacgaagcggttcgtcatcatccggcccgccgattcttgcggatagttcatcaaaagctgtacggcctttgattcctcagcttccatgctggataaaagctgctctttcagttcttcatccatctcttccagcaaagcggcgagatcgtcgttatccattttattcattgcgagagtggcttttgttttaccgactttatgcaaaacggcaagctgaaattcccgttcaagctctccgatcatgtcggtgatatcgtcaaccgtcatatatgacagatagcgggcccggtgcttttccggcatttctttaaataaaaacgccatatcatagggctgaagctcatctatcatgctccggaattctttaattttcccgtcccgcaataaaatgataatgcgtaatatgagttcgtcataggtcatgttttggaccatcgggactcgtacctcctttacggagacgcgccgtccgtcaagggaagtgcggcggtttgtctcctcatcatgtcgtcattggttatctggctgtatatgggtacttcttctgacatactcgaatggggagaatccatactccgcacctccttatcatgctcagtcatgtacgttttgaggcataaaaaaaaccttccgatatgaaggcgaaaacaagcacggcaaataaacgtgcggggccttcaatcgtagagctttagcactgtatggcataggacggccatccagctgcgttaagaatcaccttatgtcgatgattcctgttgacccattggcgtctttggacatttttgggcagcagcgtatctccatacaggagcctcacctaacgaagttcttatttgaattgacacactgagattacagaaaaaaaaggaatgtgtcaaccttaaatttgttatttcagcatatgcctataaaataaatggaataaaggcataaagcccttattccggcagatcgctttcatcttcttctgaaaggaaatgatatgattcatgcagcatgagcgcgtattccccttcttttgtcgggtgcggtacatactcagcctcgttgatatactgctcttcccttttcttcatgggacagacctccttttcaactttagattgtccaaaagaagatccgttatcatagaaaagaaaaaatcaccaggtgaagcggacatacagctatatttttcggatcgtgaaaaagttccgcagcagccacggtcccggtttgaagccgagcgttaactgccacgcaccgatcgcctgcagtccgtactgccgcacgagaaccattttttcactcatgctccgcacatcctcaaaccatacttcatgcgttctcccattttcatcagtataccgaaaataaggggaacgatcctgctgggaataacggatcactgattgatgcttcatggctgtttccatggcgcgctgattggagatggcggatccgactgttccggggcggtacggaatcacccaatcatacccgtacagcggaacaccgagaatcacttttcttctcggtaccctgctgatggcaaaattgatggtgtctctgacctctgtcaaaggcgccacggctcccggctcactgccggcgtggtgccaatcgtatgccataataaacatataatcgacgacagctccgattccgccgtaatcatatcccctcagccacggcactgcttcacttgttttcgccggaaccgatatcgttaacgcgagctggtgctccgagagcctggtttttaactgccggagaaatccggtaaaaagatcccggtcggcttctctgacccgttcaaaatcaatatttacaccgccgtatccctttcttacagtcaaatagacgatattgttgacgaggttcgttctcgccgtcgggttttgcaggacttgatgagctaattccgggctgaatcctccttctgtcagattcgtgatgacggcaagcggccgcactctgttttgccatgtggtttctatcgcggttctgtcgtttaaatcattaatgatatctccgttcgggccaaaatgatattcaaacaaagaaatcgctgatgaatagggcgcaaaatcattgattaactctctgtccgcttcaggtgtccgaatgacataaaattgcagggttcctgccagatagttagatatatcaggaatcttcactttcatacccggccgcagccggttcggctgaatatccgggtttgcctgcatcagctgcatctgcgacacataggccttacttgcgataacggcatacgtatcattcggctgaaccgtatattcattaagagggatcaaaagcgcctgccccggaacgatattcgtttcctcaagcccgttgacgcttctgatgctgtcaacaggatatccgtactttctgctgatggaaaatagcgagtcgccagactgcactgtatgaacaaacatagatgtcctccgtttccttttgatcaaaagggcgtgatatacactcttcttatctttatgaatgatcatccgttccgattccaaactctcttttcgagaaaggctgtttacaaatcagacatgatcaactatgatgatgtcatcataaaaaactgtataggaaacgcactaggggtgctgttatcggctgagataaaacatgcggcaagcgtgttttgatcccttataacccgatctggataataccagcgtggggaagtgcagattgaccggagcgcgggttcttttccatgcgttttcgttctgctgctgcatattccctcggatatgcagttttttatttttcattaaaaaacgggggaggacaccgcattatgaaacggaatatgaaccgcctgtaacaaaatcaactctttcatacataggactatccgataagaaagcaggagatcagaatgaaaaattggaaaatgagagaaattgtcgtcatgtccgtcatcagtgttgtattcgctgtcatttatttattatcaactcatgcaagcaatatagcggcagggtttttcggccggatgagctacgaaccgatttacggcatttggtttatcgtctcggtgattgccgcgtacattattcaaaaaccgggtgcggcgctcgtttctgaaatcatcgccgcgtttgtggaatgcttactcggaaatccgtcaggaccgatggtgattctgatcggcatcgcacagggaatcggggcggaagcggtctttttagcgacacgctggcggatttataccctgcctgtgcttcttttatccggtatgggatcttctgtaacgagcttcatttatgatttgttcgtttccggatactctgttttgaacccgggtttattaaccgtcatgcttctcatccgtttggtctcaggcgcgcttcttgccggccttctcggcaaagcaatcagtgatgcgctggcttacacgggagtgctgaacggcatggcgctcggaaaagaattgaagaagaaaaagaaacaggtgaaccaagatgcaggcatttgaaccccttctatcagcccgccgtctcaccttttcttatgatgaggatgagaagccgatttttcaaaacgtgtcatttcagctccgcaaaggagagcgggctttattgctcggaccgagcggatgcggcaaaagctcgctcgccctttgtttaaacggcctgtacccggaagcctgtgatgcggttcaaacgggaaccgtttccttaaacggaacaccgctttcaaacttggcaggacccgccgctgcatccatcggcgtagtgtttcaagatcccgatcagcagttttgcatgctgacggttgaagatgaaatagccttcggtctggaaaatttgcaatatacaaaagaagatatggataccatcattgatgacgttttggaaaaattagaaatcactcatctgaaaacacgaacgatcgcctcgctgtcaggcggttcaaaacaaaaagtggcgctcgcctgtatcattgcgatggatccggaactcattattttggacgaaccgacggcacagcttgatccatattccgtccgtgaatttgtgcggctgatcaaagaacttcaagccaaaagaaacttcggccttctcgtaatcgagcatcagcttgatcattgggttccgtggatggacaggacgattgtccttgacgaaaccggtcagatagtgatggacggagagacggacgctgtctttgaaacaaagcttgaagagctgacgcggctcggcattccgattccgcgggtaatcccattgcagaaatacgtcaacattccttttacattgtgcaaagaaagcctgtttcataaacctgtaccggctcttccctgcccccgggccgccgcgctttcggcagaggatgcactgagtgttcacgggctgtcatgcaaaagaggaacggatgtcatttttcaggatgtgagcttttccgtaaaaaaagggtcaattactgcgattgccggccctaacggaacaggaaagtccacgctcctgtccgccgcggccaagctcatccgtcctgtgagcggagacatcaaaatagacggcagaccgatagattcctattcagaaaaagagcttcggcgcctgatgggatatgttttccaaaaccctgaacaccagtttgtcacagattctgttattaacgagctgctgttcggctttgaagacggcaatgccgcaaaggagaaagctcttcagctgttaacccggttcggcctgagacgccatgcctcacagcatccgttttctttaagccaaggacaaaaacgcaggctcagcgtcgcgacgatgcttatgcacaatgtgaaagttttgctgcttgatgaaccgactttcgggcaggacgcaaaaacggcgcgtgagtgtatgctgatgctgcgggagattcaaaaggaaggaacggctgttttgatggtgacacatgatatggagctcgtctcagattatgcggacacgatccttgtgctctgcggcacgaagctggtataccgcggaactcccgattctttgtttactgatcatatcggaaccgcggagcgggcgcatttagctttgccgctgcggtatgaatggatgaaacaggacaggaggcggagaaatgaacgtgcggctggaagctgttaacccgtccattaaggcggcggctgttttgttatgcgtggttatgctgtcgtttatttataatccgtacaccccagctgtgttttatatcatcattgcgggaggcgtcctcttggcgggaagcgtgccgctgaaaaaatggctgctgtttacgattccgtttgtcattcttgcctttggttctttatggaccgccgccgtattcggaaacgtcccgacaaccggaagcaatctgctgtttaagctcgggccgattgccgtcaacagtgccaacgcggcgctcgggatttctatcgcgtttcgtattttatgtttttccgctttgtcgatgatgtttcttttcacaaccgatccgattctgtttatgctcagtctgattcagcagtgtaagctcccgccgaagcttgcctacggcgttatcgccgggttccggtttctccctcttctgaaagatgaaatcctgatcatccggcaggcgcacagaatcagaggcgcggcgtctgattccgggctgaaaggaaagatctccgccttcagacgcttcaccattccgcttttggcaggcgcaatcagaaaggcggaacgaacagcgatcgcgatggagtctaaaggctttacgggcagccgaaaccgcacattttacagaacggttactgtgcgccgcgccgattggttctttttcctgctcgtgcttctgttattcggcgcgagctgtctcgtttcactgttgtttttataaaaacaggccgccggagtgattcggcagcctgttttgttatgtatgttactgatggtaattaagagcctgagcgaggttggatttgatcgtaatatctgagaaattaataccgagctgtacggcggtttgggcaatttccggcctgattccggataaagtggacgtaacgccgatcagattcagcgcctcaattaatttaaaaatctggtgcgccaccatcgtatcgacaacgactacgcctgacaagtcaattaacagatgctcaatcagccgatccgcacatgtgctcagcgtattttccagaatgaatttggcgcgctccgtgtcaatatctccgacaagcggcagaagcgccgtccgtttgctcagtgtaataaccggcgagcttaactctaaaatcatttctctttgcgcattcagctgcatttttgaattatgctcggcatgatcgacaaacttgtatattgtaaaatcaaatacttggacaattaaatcctcccatctcttcctttctccctcagcaaacgcggattcatgttcatcggcaaacgcgtcataataactgatatacagcctccggtttctcatgaattcacggacaacgtactggacgggagtatccagatgcttctggtctttcgcaagctcaatcacccactgctcgaactcttctaaaaattctttttccggcatgatatacatgttattaatatgccgataaaattctttatcctgctccttcagttcttctctgatgacgggatttgtcaaagaataaattgaattcggatccgaatcttccatcgtttcgatccaatcttccgcaatttgatcaacctgtcctgaaaaatagtcgtataatgcttcacttatcttcatacctcttctcctttcccattttccaattatagcgttaccgggtgatgaatcaaaatgaaagctgttaaactatccatttatttgaaattttttagtgcgatagattgcgccttttttatgaaaatgcttcaaatgactctttccgcgcggcaggctctgccataaaatagtagcaacacccttgaatccactcgcaagcataaaaaaggagggcttttttatgaatggtgaaatgcggttgattccttatgtcacggatgagcaaatcatggatgtgaacgagcttcctgagggtattaaagtgattaaggcgccagaattgtgggcaaaagggtttaaaggcaaggatattaaaatcgcagtgcttgacacaggctgtgacgttaatcatcctgatttgaaagaccggattatcggcgggaaaaacttcaccgatgatgacggaggcaaagaagacgcgttttccgattacaacggacacgggacacatgtttccggaacgattgccgccaatgattcaaacggcggaatttcgggagttgcgccggaagcgagccttttaatcgtgaaagttctcggcggtcaaaacggcagcggaaaatacgaatggatcattaacggcatcaactacgctgttgaacaaaaggctgatatcatttctatgtcactcggcgggccgagcgatgtgcctgaactgaaagaagccgtcacaaatgcggtaaaaagcggtgtactggtcgtttgcgcagcaggaaacgaaggcgacggagacgagcggacagaggaactgtcgtatccggccgcttacaacgaagtaattgccgtcggatcagtctcagtcgcgcgaaaatcgtcagaattttcaaacgcaaataaagagattgacctggtggctcccggcgaaaacattctctccacccttcccaaccataaatacgggaagctgacgggcacttcgatggccgccccgcatgtgagcggagcgcttgccttaataaaagggcttgaacaggcctcgtttcagcggacgctttctgaggcagaagtttacgcccaacttgtgcggcggacccttcccttggatatcgccaaaacattggccgggaacggatttctgtatttagacgcgcctgatgtgctgatggaaaaagccgaacaggcacagctgctgtctttctgatatgtttctcatataatgattgatcagcttgtcacatcatcaattttttaaaatgtgagattttctattgacagtgatctgaataagctgataagataaccaacaaatgatgtaacttttcaaaaaaattgaaatattttctcttatcgagagttgggcgagggattggccttttgaccccaacagcaaccgaccgtaattccattgtgaaatggggcgcgtgatttttgcgccgagacgattgtctcttaaggcacggtgctaattccatcagacgtgatctgagagataagagaggcttacattttgatgttaaagcctctttctctcatgagaaagaggcttttttgttacatctcacttaaaggaggagacttaatgacaactattaaaacttcgaatcttggttttccgagaatcggcttgaacagagaatggaaaaaagcgcttgaagcttattggaaaggaaaaactgataaagaaacgtttcttaaagagcttgacggtttattcttatcagctgtcaaaacacagcttgaccaaaatattgatattgtgccggtctctgatttcacccattatgaccatgtgctcgatacagccgtcagctttaactggattccgaaaagattccgcagcattacggaccccattgatacatatttcgcgattgcccgcggtgtaaaagacgccgtttccagtgaaatgacgaaatggtttaataccaactaccattacatcgttcctgaatatgacgaaagcattgaattccgtctgacgagaaacaaacagcttgacgactaccgccggatcaaagaagaattcggagtggaaacgaaacccgtcattgtcggtccgtacacatttgtcacgcttgcgaaaggttacgaagaatcagaagcaaaagcgattcaaaagcgccttgtccctctttatgttcagctgctgaaagagcttgaagcagaaggcgtcaaatgggttcagattgatgagccagcccttgtgacagcttcttctgaagatgtccgcgccgcaaaagaactctatgaatcgatcacaaaagagctttcagggctgaacgtccttttacagacatactttgattcggtcgatgcgtatgaagaacttgtttcttatcctgtacagggaatcgggcttgatttcgtgcatgataaaggcagaaacctggagcaattgaaaaaacacggcttcccgaaagataaagtgctggcagcgggtgtgattgacggccgcaatatttggaaaatcgatgctgaagaacgccttgatgcgactcttgatatcctcagccacgctgacatagaggaattatggattcagccttcaagcagccttctgcacgtcccggtggcaaaacaccctgacgaacatcttgaaaaagatctgctgaacggcctgtcatacgctaaagaaaagttggcggaactcggtgtcttaaaagaaggcctcctgtccggcaaagcggccgtcagtgcgcagatcgaagagtccaaagcggcactgaaagcactgaaagctttcgcaacaggggcgaactcagctcaaaaagaagaactgaatcagctgacggaaaaagatttctcccgtcctgcaagctttgaggaacgattggcgctgcaaaatgaatcactcggtcttccccttctgccgacgacgacaatcggaagcttccctcaatctgctgaagtgcggagcgcacgccaaaaatggcgaaaaaaagagtggacggacgaacaataccaagcctttattaatgcggaaacgaagcgctgggttgacattcaggaagaaatcgggttagatgtgctcgttcacggagaatttgaacggacggacatggtagaatacttcggtgaaaaactggccggattcgcctttacgaaatatgcatgggtgcagtcttacggttcacgctgcgtacgtccgcctgtcattttcggagatgtcgaatttatcgaaccgatgacggtaaaagatacgctctacgcccaatcgctgacggaaaagcatatgaaaggcatgctgactggacctgtcaccattttaaactggtcattcccgcgcgtggatatttcaagaaaagaaatcgccttccagatcgggcttgccctcagaaaagaagttaaagcgcttgaagatgcaggtattcagattatccaagtcgatgaacctgcgctccgcgaagggctgccgttaaaaacgcaggattgggatgaatatttaacttgggccgcagaagcattccgattaacgacgtcttctgtgaaaaatgagacgcagattcatacgcatatgtgttacagcaactttgaagatatcgtagatacgatcaatgatcttgacgcggatgtcattacaatcgaacacagcagaagccacggaggatttttagagtacctgaaagaacatccatacgtaaaaggcctcggactcggtgtatacgacattcacagcccgcgtgtgccggctactgaagaaatctatcaaattatcgatgacgcgcttgaagtgtgtcctacagaccgcttctgggtaaacccggactgcggactgaaaacaagacagcaggaagaaaccgttgcggcattgaaaaatatggtcgacgctgcgaaacaggcacgaaaaaaacaagctcagcttgtataataaaaaacagccatccctgatttgcggatggctgttttttttgcctcgttacttatttttcagcgcctctgcaagttcatacagcgaatcatgccgcttaatttgatagccccgcccttctttctgcaaataccctttttggcagaattgcgtcagtacatgtaaaagatgacggtaagatacacctaaataatcacaaaccgttatgtgcttctctttataaaatccttcataagccgtttgcaaaataaaatcggcaagccggttttcaagcgggaacgccagactttgtgaatactttgaagccataagtgtcgcctttatacttaaaaacttagccaattcacgcaggaatttcgcatcctgaagcaattgcgtgcggcagcggtcaatcggcagagcaaaacaaacagtcttcgctgaggcctgaattccttttgtgtaatacacttcatgtaatagttccatttctccgatataatcatttttgttgataaaattaattaacgatactttcccgttttgatgggttacatatattttcgcttttccttcaatcacgtaaaacaggaaatccggcctcatgccctcttgaatcatccattcatcccgctgatattcgcgcacttccatatactcttccgccggaaaagaaaataaatgcgcgattgagtgtttttctaagtggtgccgctttttctcacctttataaatttccatcttccaccccaaaaatatgagatatctcatattgtctttacgtctttacatgataacatgccaattaaaggaggaacgggaatgaacgcatatcgctggatgagtctgcatttttttagtttttttatgacatggggagttttccttccctattggacgggatggatggtgcatataaaagggatttccgtatccgaagccagtttcattatgagcttaggcctgacagcaagaggaatttccacattacttttctttccttatttatcagggaaattcagcagcaaagccttactgaatggcgccagaatcggtacgtttcttgcacttttatgttatattccggctgattctttcccaagcctgcttcttgtcacattaggactgcatgtgttttacccggctttgatgcctgctttagacagcgcttgcggcgtccttgtacagcataacgagttaaaggattacgggaccagccgccagtgggggtccgccggattcgtgtcagccggcattatcctgtccgtctttacaggcatgtttggggatcaagtgattttatgggcactgcttttaggcactctgatattcgtatgcctcggctttatgcatgcccctgctgttctttcaaaacggccggaaacagaccgcgcaaaaaaagagggcatgctttccttatttcgcgtcaaacatttcggtctggtgctcgcaatcgtcatcttattgcaggcggcacatgcatcttactacaattacggttatctctttttgcaagaaatccatgcacccgcatatgcaatagggatcatcatcaacatcgccgttatcgcggagatcatcttctttgcaatcgctgaccgatgctttcatcaattttcggcaggctctttgctcgccatggcggcgcttggtgcaaccgtacgctggatactggtatttgccttcccgcatgtcatcattttctgtattgcgcagacgctgcatgcatgttcattcgcgatgggacactatgcatttatgaaatacttaattaagaatatttcacctgcgcaaatcccgaaagcccaaggcatgtattccgcgctggcgctcagctggagcacagcggtatttaccattttcggaggttttctatacgaaatcgaacctaggtatgcctttatcggaatgattgtttgtacgatcccttctatgcttcttgcacttttatacaggaaactggaaatgaaaaagaaagtttttatcggaaacgcacaagatatatagccaaagctttctgtatatatttgatctaatttcctgcattcgatcaactcggaggaacatgggatgaatcagcatacttcatttttaaaacgggcggtcacacttggagttgagagcgtgaacaattggacatcaagcagcgatccgggatgcgtgccggacgcttcaaacagatcagcttgacgattgtgtgatttacacaagctgtgaaccgtgcccttagaaaaacctgctcaaagcgcgcaggtttatttttttgtttgcaattgtctaattaaagtaaattgataccgtactgctttacgctttttttcgggaaactttgtacgtaatgaagaaattttcaaccaactcataaggagggacgttgtgtcacagcctaatttaccgaatatcacccctgtcgttacactttccagagacgataccattaatcttcttctgtcggcaattgctatggaagaactgggaatggcacatattctgaatgcggaaggggaaaaaatccaatacgcgctcggaacgattcccggcttaactgggccgccgtcaagtcttgcggatattctgaacttgaacgagagcgtccgtgatacgcttgacagcttaatgaaacaggagcttcttctcggttcaaaattggacagtatctcaaatattcctacactggcggggccgacaggggctacgggaccgacgggaccagccggcggacccactggcccgactggagcaatcgggccggccggagctacggggccaaccgggccgaccgggccgacaggggtcaccggtgcgggtcttcaagggattatcgcttttaatccgttaattgcccctacttatacacccgggcaggttgtcctgtataacggcagctcctatgtcgtgaacacagcttcgcctgccggggttccggatacgtctgccgattatacgcttttagctgccgcagggccgaccgggccgactggaccaacgggcgctacaggagccggattgacaggactgacagcttttgaccctgcggctgcacctttttatacggcggggcaggttgtattgtatgagggtgcttcttatgtcgtaaatatcgataacccctcaggcatccccgggatatcgccggactatacactgcttgccgccgcagggccgaccgggccaactggtgttaccggcgccggactgcagggcatcgtgccgtttgatcccctcgccgctccttcgtatactgccggacagaccgttacgttcaacggcagctcttacgtcgcaaacgtaaacagcccggcgggaacccctggagcttcagctgactatacacttttagccgcgacaggaacagctggtgctaccggaggctccgggccgaccgggattactggtgttacaggaaccaccggaccgactggagtcaccggcgttaccggagccactggaccgaccggaggcactggcgttaccggaaccactgggccgaccggaatcactggtgctgctggagccaccggaccgactggagtcaccggcgttactggtgacactgggtcgaccggagccactggtgctacgggtgtcaccgggccgactggaatcaccggtgctaccggagccaccgggccaactggaatcaccggcgttactggtgacactggaccgaccgggattactggcgttactggtgacactgggccgactggaatcactggtgctaccggagccaccgggccgactggaggcactggcgttaccggagccactggaccgactggatttactggcgctaccggaggctccgggccgaccgggatcaccggcgttaccggagccactggaccgaccgggattactggcgttacgggcggcggtattgtcgcagttgttgtcggcggcacaaccatttccttgccgaatgatcaaaacctttccgcagatattacggctaatgctgcaaatactgtgtttaccgttgctccggcaggacgatactatatctcctaccatattaatttaacggccggcctgcttgtcagttcacgggtcttgattaacggcactccatttacaagttcaattattgcaccggtcgcgtcattggcaaacttcaataactccttcattgtgactttggcagcagacagcaccatccagctccagctgttcggattattgggtgcggcgacattgcttggagggagtgtcggtgcagcattaaacatcattcgattatcttaatggaacatgcaaaaaaaggatcaggcgtttgtccgctgatccttttttaattgagacagaagttcttgtgcgggtttatattgaggattagatttcacagattttttggcgtaagcgatggccgtcatatcatggtttaattcagcatgacatttcgccatataataaaaagctctgaaatcggcggctccttttaaaattaagtgatcagggttttcctcttcaatccgtgtcccgttttcaaatgctttgattgccgctctgtacttctccagatgatataatacaagacctttataataatgaagattactgtaatcaggataaagcctgagcaccttttcaatcccctgctcggcttcttcataccgtttgagctcaagcaatattgtatattttaaattatacaagagagacggaggcattcggttttcacttaaaaattgaaaaattgagccgtttacaagatgtaatgctttttcatagtcttttattctgtaacattcacttgccaaatgataaataagccacggatcaggagtttcctctgaaagctcttcatttaaaatgctgatattccgtttatgtttttgtttgatcttttcttcctgctccaaatagccgtagtgatgaatcacacaaggaagcgtaaaaaaagtattgttttcttcctcattggaagacatgatattttcgtgaattctgccttgatacaaaaggccttcatgattgcggaacagtctcggctgcatgctttcaaaggcttcattttcatccagctgttttcccgtataattgataatcttcaaaaggccccggctcggtaattcgtcatgaagcagcgaagttaaaaagcggcccgtctcctgatcgagctcttcatccgcgtcaagcattaaaatccaatccccttcggcatgctgcagaccgtaatttctcgcctttgcgaaatcattctcccattctaaatcaaacactctggcttgaaagcttttgcagatatcttttgtattatcttgtgatccggtgtctacgataacaatctcatcagcaatatcttgtacacttgataaacagcgggagatatatctctcctcgttttttacaatcatgcaaagcgtcagtttacattcagcatttccgctcattttctcacctttcccgcttttggagttgtcgattgaaccaaggccgttcaggagtgccgttcatcgttacgatgacaggtctcacccatctgacggcaggttcggcagatgaagctgtattccattcctgccattcctgaagctgcctgaccgcccgcttcgtaatgggatgcgcccggaattcgcgcgggctttcagaaatgaatttttttgttcgttctgtcactgttttcatttcatgaaagtgccgctcatacatccgctcctgctctctttccaggctgatcattaaaaacagccgcccgcctgtttccatctgccagcggcacaatgcggagaacagcctgatttcttccttgtaatttgaaccccttcttttatcaacggtcacagataatatatttaacagcgcaatcgtgagacaatgcatggcttcaaaagatgtctgtttcgcttttgcgatgcttggatacggcatatgcttcacccgtctctttctttatgaacgctccccgcctttcctcttccatccgcattcctcacaatcctcgcactcacagcagccaatgcggccgtagaacaggccgtcacacggatcttcaggtgaaggattcggaaaacacggatcacatgggccgcttgaatcgtcgcacggatcatccggttcgcagggatcatccggatcccacgggtcatctgggtcgtccggatcgcccgggtcactcggatgacttgggtcgctcggatccatacaggcctcagaatcctgtaagtagataatgtcctcgagtttcgtctgcaaaaggagctgggatttcatgacggtgcgcagaagccgttcggtgcttctattgattgctgacaattcccctaaagagggatcgccggaagcgccgagaaaggtttgaattctttctgcttccgcctgcagaatatgggataatccgatttcttccagagccacggatgaaagaaggaggttcaaagtctcacatctggagagtgtaatgtcgggggtgatgttcggtatgtttggaagagacatcgatttctccctcgtttctcttggtgtcattatgctaaagtgctatatcgtattcttattccgggagagaagagatcattactgatgttttcgttaataaaatatcccggatataagatccgggatattcgttcgtgcattatttgagttcaagtttgacgtcaacatttcctcttgttgcttttgaatacggacagaactcgtgagcggcgtgtacaagcttctccgccgtttctttatcaaggtcttttgtatcgatgacgagcgttacgccgattttgtatccgccgtcgctctcatcttttaaaagactgacctgtccttcaatttcagaggtcatgtcgatgttctgttttttggcggcgagctcaagcgctcccccgaagcaggcggcatatcctgccgcaaacagctgttcagggtttgtgccggtttcaccgtctttttttgcattcggcatgatgatgtcaaaatccaacactccgtcttcggatttaatatgtcctgaccgtccgccgactgcggtcgcttttgaagtaaataatgccataattatcagcctcctcattgtgcttattgtatatattgcccctgctcatatttttaaacatgattggaataggaaatgtgccttttttcggctacaataggggtaacgttaacaaacaaagagttggtgaaagaaattatggcagaaaaagaatttgaacatatgaaactggagaatcagctttgttttttgttgtatgcaagctccagagaaatgacgaaacggtacaaaccgctgcttgataagctcaatgtgacctatccgcaatacttggcgcttctcttattatgggagcacgaagaactgaatgtaaaacggatgggtgaacttttgcacttggactccggaacgctgacaccgatgctgaaacggatggagcagcgcggaatcattatgagaaagcggtcgcctgaagacgagcgctctgtgacgatcagattgacagatgaaggatgcgccttgcagaaaacggcggcggatattcccattgcgatgctggaacagacgggactgtcaaaagaggaattaaagcaggtaaagcaggcgctttatgaggttttgaaaacattgcacgacgtaaaataaggatgccccgaatgggcatccttgtttttattctgctgctagaagatttacttcaatatttcccgctgtcgcttttgaatacgggcagacaccgtgcgctttttgaataagtgcttcaagctcctctttattaatgccggatgctttgacctcgagggtaacgccgagtttatatccttggtctgcttcatctttcagcagactgacatgcgctgtgacctctgtttcaatactcaggcgctcttttctcgctacgagctgaagggcgctgtcaaagcaggcagagtatcctgcagcaaacagctgttcagggtttgtggcatgttcgagccgttttgctcttggcgttcccggcatggcaacatcaaggttcagcacaccgtcagaagacgagacttttccctcccgtccgccggcggctgatactgtagctgtaaataatggttttgtcatgtgaattcacctctatcatattgtttacaatttaattgtacacaatataatgtgaatcgtcaatctccccgcacaaaaaaagcctaccctttttcaaggataagcttaaaaagactatacgcggatttgtccgtttcctttgataatgatttttgtagatgttaacgccggaagccccatcggtcctctcgcgtgaagcttttgcgtgctgatgccgatttcggctccgtacccgaattcaaagccgtctgtaaaccgtgtggaagcattatgatacacggcggcggcgtcaacggctgtctggaagtaagcggcattctcaccgttttccgtcagaatggcttctgaatggtttgtgccgtactgctgaatgtgacggaccgcctcctgtacgtcatgcaccgtttttacactgagaatcggcgccaggtattcagctccccaatcggcctcttcggcttgtttcgcattaggctccagctcgcaaatcatctgatctccgcgaagctccacccctttttctgtcagctgattcagcagctttcgtccgtgttcttccgcccatttttcatggatcaaaagagattcaatcgcattgcagacggaaggccgctgtgttttggcgttgatgacgacatctctggccatatcaggatctgctgactcatctatgtacacgtggcaattgcccgctccggtttctaacacgggtacggttgattccctgaccaccagatcaatcaaatttttgccgccgcgcgggatcaatacatccagcccgtcatttaatgtgaagagctgtttcgcggtttctttgcttgtatcttctatgagctgaacggcatcaatcggaagctttgacagtcccagtgcgcgtttcatcacactgacaagtgctttgttgctgtggatagctgacgaacttcctctgagcacaaccgcgtttccggttttcaggcaaagtgtggcagcatctactgtaacattcggtctggcttcatagatcatgcccactactccgaggggcacgcggattttttcaatggataatccattctctttttgaatggtctccaaagattcgccgacgggatctttcagaccgattaatagttctacagcatccgcgatatcgagcaggcgtttttcgtcaagagtcagcctgtcaataatgtcaggcgtcagtcctcttttctgtcccgcttcaatatctttctgattctctgttaaaatcagctggcgttcatttctgagcccgtctgcaatacattggagcgcttcgtttttttcagcggtcgttttcatgaccatttcggcagccgcttcttttgccaaggcagctttttgcaatacttcactcatttgttttccccctcgtcaaataaattcacccaatcatttctgtgaatcacttccacctgcttcgcgcccggaagctgatcgctccgcttccctttggcttccaaaatctcatcggatgagtaatgcgtctgccctttgccgatgatgccgccgggacctctgacttccactacggcccctttcggaaaactgccgcagacatcggcgacaccggccggaaggagacttgagccgttatggatcatcgcctgctccgctcccccatcaatgatgatttcccctgatatcggagaatgaaacatgatccattgccgtgtattattaacggaggacagctctttatcaccgatatatgtaccgtcgcctttaccatctaaaatcagcttcagtttttcccgtccggcaccggtcccgataaacaccttaactccgagcgacaacgcggtctgggcagcgagaagttttgacttcatgcctccggtgccgactttcgagcctgctgaaccggcatacccgagcaattcaggtgtaatgtcagtcaaataatcaaaccgctttgcgtcaggattttcattcggattggcatcgtacaggccgttaatgtctgtgagaatcattaattggtctgcatgaatcaggccgctcacaagcgccgacagcatgtcattatctccgaacgtcagctcttcgactgatgtggaatcattctcattaataatcggcacgactccccgctccagcaattccattaccgtggcatacgcatttctgtaccgctctctttttgagaaatcatttcttgttaataaaatttgcgccggcgtcagaccgtatctttttaaatggtccatatattgctgcattaaaagcgtctggccgaccgcggcggctgcctgctttccttttattgtaacggggcgcgacggatagccgagagcggaaaaacccgctgccaccgcgcctgaggtaataaggattacttcatgcccgttttcttttaataatgaaatggcttccgtatgctccttgattttggcttcatcaatacttccgttactgtttgtgagcgagctgctcccgattttcacaacaattctctgctttttcatagtttctcctccgtggcaatcaatccaaaccggctcatcaaataaaaaagcccattccatcctgaaaaataaggacgaaatgggctttccgtggtaccaccttgtttgaacgcgttttgcacgcgtcccgctttcctgtaacgccaggttatcgcgcctgagttttcccctcaggactccaaggcaggttcggcaggtttcatgcggcaaaatgtttcagcgggccattttgctctctgtcacagaaagttctgcgtactgatcctcttcaacgctcaatgatttttttatattatgcaaagaaaacgagttcttgtcaagacattttcatccataaaaaacggcccgcctccccggcggaccgctattaattaaatacgatcgttttgttttcgtgaacgatgacgcgatcttccaagtgccattttacggctcttgccaatacgctgcgctcaatggttctgccgatattcttcagatcctctgcgtgatctctgtgatcgacgcgttcaatatcctgttcaataatcgggccttcgtcaaggtcgtccgtcacatagtgagatgtcgcgccgattaattttactccgcgctcataagcccgtttatacggattagctccgataaaggccggcaggaatgaatggtggatgttaataatccgattcgggtgtgcggatacaaagtcagacgtcaaaatctgcatgtagcgggcaagaacgatcacatcaatctcatactgctccagaagctcaagctggcgccgctcaacttccgcgcggatgtctttgttagccttcatgtaatggaacggaatattcagcggttcaaccacttctttcgcctcttcatggttgctgatgacaaccgcaatttcggccatcatattgccgctttgccattcccaaatgagttcatgaagacagtgcagctccttcgatacaaagatcgccacgcgcttcagctcacttgccagagacaggctccatgtcatgccgaatgtttgggcgattaaagcgaacgcctgctttaagtcctcttttttctcccgaatgcctttgcagtcgaattcaattctaagaaaaaaccggccgccttcaggatcagtcgtatattgatttgattcaataatatttgcgccatgttcaaacaaaaacgcggacacagccgatacaattcccggctggtcggggcagctgacgagcaggcgccctttttcctcattcccttcgcggtagtcattcagccgctgtgtcatatatgaattcatatgttttaatccctcgtatcttcataattcgtaacttattatagattatactgaagatttgttaaaaatcaatttacgaaagaattttcaatcctacggcagcgcataaaataagcgcaatgaaaaagatgcgcttcgcatccttctgctctccgtagaaaagaataccggctaacgcgccgcccgccgtgccgatacccgtccagattgcataggccgttcccatcgcgatcgtttccatcgcataagaaagcagcgaaaatgaagccgcaaaaccgacgataatgaagagaatccatttgactttcttttctttttgaaattgattcatcaaaatgaccccgagcatttcacaaagacccgcggctatcagactgatccaatgcattacgacttctcctccttcgtctcaggcgtatcctgtgtgaccagctttaatccgatgacaccgatcagcaaaacgccgatcagcacgattttcaccggatcggcctgctctttgaaaagcaagatttcactcagcacggtgcccgctgtcccgagaccggtaaagaccgcatataccgttcctacgggcaggctgttagtcgccttgattaatagataaaaactgatgatgatgcccacaattgtggagctccacgtcagcgccgaatctgcatgtttcaggccgatgacccatacaacctcaaatacggccgctaagaccactaaaccccatttcatgttcttcaccctttctgttttcggacaatacaaaaaagcccggatagtcgtctcacatgagattgactctcccgggcttttttccctccgtgtgcatatgcgggaatatgtccgcatatgtgttttctctcggaccaggccatgtgtgaacatgcggaaccctagaaaacatgtctgttcgtatcatactacatttcgctgaaacgttcaatgtcagatgtgatgtcaaaaaccgtcagctgcctctcccatttgttaacggtctcgccggctgccatgccgattttttccgcgacgcggacggaagcaaggttttccggatcgatcagcgccgctatgcgtccgtattgctttgtttgaaaaccgtatgtcagacaggctttcgcagcctctgtcgcatagccgcagccccaatggcggcgggcaaacatataaccgatttccatcatcgcggttccgtttaccgtctgcggaacgattccgcattgaccgagaaatgcacccgtctctttatcttctgcgatccaaagactcacgccgtatcctttggccaatcgtttgttccaggcaatccattccttcgtttcccgtctgcttttaagagaaggataatatttcatgacctctctatcggtaaacagcccgtacaaattctcttcatcgtcatcccgcatggtgcgcaggcggatacgcctggttgtcaggatggtgccggaagacttatgcttcatcatacacgccacgtctcctttccctgtattagattatggatccggcaggaaaagtcctttttcagcgtaaaaaaaccgcttttttaaaaaagcggtttgacgattaccaaggcttatctgtcccgagcgcctcggccagggccttgctgtgttttaaacggttttttcgttctccggcgcgctgaacggccgtattgtgaagcatgatttcttcctcggtttccggcacgatccgcggaacgggcaccgatttcccgtttgaatcgagcgcgacgaaggtcagaaatgacgttgccgcaagctcgcgttccccagtcatcagatgctctttaatgactttgacaaacacctccatagacgatgttccgacccatgtgacgtaggattcaaggcatacggaatcctgctggccgatcgggcgcaaaaaatctacagagtccattgaggccgtgacggtttcacaccggcagtggcgggccgcggaaattgaagcgatatcatcaatgtagctcatcagctttccgccaaacagcgtattgtggttattggtatcaagcggaaaaaccctgcttgttttgactacccttgtttctttgcaaaatcttgattctggcaacttcattattcaaactcccctttggtgtctggtcgtttcgactcattcatctgctaccacctattaaacaatacttttaccgttttgtctaaaattttaaatgttaagttggttagatattctgtcagaaatgtttcattattcatcacatccgggaataataaacgcacattgaatatcgataggaggctatcacatgcacgtatccattcccaaatccacgccaaaaccggcatgccgcagtgaatatgatgctttgaagacagtcattttatgccggccggaacacatggccatcaaagatattattaacggaacacaaaaacattttaaacaagaaaatattgacatctccaccgccctcaaacagcataatgagtttattgacattttaaaatcccatcagattgaagtcgtcctgctgcctgccgatcccgaattgcctgagcaggtattcacccgggatatcggatttgtcttaggagaaacagcgtttatttcaagcatggcggcttcagtccggcagggagaagaaaaggtgtttcaacacctgcttgatgatgagaaaatcccttatacgcgaatcagcaaagcgaacattgaaggcggcgacgtcatgatcgcagacggcaccgtttatgccgggctgagcgagcgcacggataaagcggctgtccgggagctgcaggaggcgctgccggaaatgaccgtcgtgccgatccctcttaaggaggatttcttacatttggactgtgtgtttaatatgatctcggaaacggaggcgctatactgcaaaaatggcttacggcagaaagaaattgatcttcttgccgaacgttttgagatgatagaagtgcctgaagaagaacaatttacgctcggaccgaatatcctgtccatcggcaatcagacaattatcagcctgccgcagcaccgtcatacgaaccgagagctcagaaaaaggggatataaagtcattgaaaccgagttttccgaaattatcaaatcgggcggttccttccgctgctgcaccctcccgcttgtcagaacatcttaaacatttacaaggcagtttccttcaagatacgttaatatagagaagacaagacttaaagggggaaaccgaatggctaagtacataggatacgcgggaacatatacaaaaggcggcagcgaaggcatttattgttttgaacttgatacagaagcgaaacagctcagccagccgaagcttgctgcaaagctcggcaacccgacatacgtcacaccgaactctgataacagcatgctgtattccattgaaaaagcagacggaaaaggcggcgtcgcagcctatcaaatcaatcagaacaccggcgaattaacttttgtgaaccaccagctgattgaaggcccgtctccatgccacgtcagcattgatagtaaacatgaatatgttttaaccgctaattaccacagcggaaaagtgcacgccttccctgtcaatcaggacggcagcctgcaggagcctgcagctgaagcagctcatacggggaccggtcctcatgaaagacaggagaaaccgcatactcatttcgcaggctttacacctgagcataattacattgcagccgtcgatttagggacggatacgctgtatacttaccaaatgcaaaacggcgcgctcacagaggtaaaaacccattctttcgcacccggttcagggccgcgccatatcgttttccatccggcggaaaaatacgcctatgtcatgacggagatcagcaatgaagtcatcgcgcttgaatacaatccgaccttaggtgaattcagagagcttcaggtcatttccgctttgcctgaaggctttactgacaaatctcagggcagcgcgatccgcatatctaaagacggcagatttctttatgccgccaaccgcgggcatgacagcatcgccatctttaagatcaatcaatattccggggaattgtctcttgttgaatgggtgccgacagaaggaaactggccgcgtgatttcgcgtttgatccatccgaaacattccttatcgcgtcaaatgaagaaacgggaaatctggttttgtttgaacgcgatccggaaacgggcagactgactctgcttcaatctgacgtaccggttccgtatccggtctgcgtgtcatttctgcatcaggtttaatcacaaagaaagctgacgatttaaagtcagctttcttttttgtataagtgacaggcgacaaaacgtcccgtcttcacttcctcaagctcaggcgtaactttaccgcagagctccatcgcttcagggcaccgcgtcctgaaaacacagccgctcggcgggttaactgggctcggcagctcccctttcagaataatccgttcacgcttgtcctcaagaagcggatcagggatcggaattgaagataaaagcgccttcgtataagggtgaagcggttccttgtaaagcgcagcgctttctgtgatttccatcatgcgccccaaatacatcacgccgatcctatcgctgatatgcttgaccattgataaatcgtgagcgataaataaaaatgtcagccctttctccttctgaagcctttttaaaaggttgacgacctgtgcctgtacggacacgtcaagcgcagaaatcggctcatccgccacgataaactcggggtgcagagaaagtgctctggcaatcccgattctctgtctctgtccgccactgaattcgtgggggtaccggctgccgaaatccggatggagtccgacagcttcaagcagttcatccgccatcatcagacgggctttacgggtattgtaaagattgtggatttccatcggctccataataatttcccgtacggtcaggcgcggatttaacgaggcgtaagggtcttgaaaaatcatctgcagcttgcggaataagaccgaccgctgatctggcgcggcacggtgtatgtccgtcccttcatatgataccgaaccggccgtcgggtcgtacagacgaagaataacccttccgagcgtcgatttaccgcaccccgattctccgacgagtccgaatgtttcccctctttgaatgtgaaaactgacaccgtcgactgcttttacggctttctttcttcctgcgtcaaaatgcattttcagcccgctgacttcaaggagcggagacgctgtcatattcattcccccttttcgctgatacagcggcgtacgatgcataattccttttcatagacggttccttccaaaggcagcacttcgattgtttttcccgttttcggggagtgcagcatccggccgtctcccagcgccaaaccgacatggtggatcgcgccttgtccttcatcataggcgaaaaacaaaagatcagccggccggatatcgtttaccgcagcgccgaatccagcttttgcttggtcctgcgcatcacggggaagggcataaccgtttgctttaaataccgaatacataaatccggagcagtcaaacccgaaaccgctcagtccaccccataaataaggaagcccgagaaacatcatgcctgtttcgatgatatctattgcccgccctttcctatgccggaattcgtctgcgtcagcttcctttacgaatcgttctccgagcggcgtcgccacccggaaaaagccattttcacgtccggctgccggaagacgcgttaagaaactcacttcaagatccggttcgccgtttgagtgatataaaaaagatgtcggtttggtaatccatacggcaggagaagatgtgggaaagctgttttttgaaagctggctttttttcacccagccaggatatccgcgcgcgtccttttttgaaggctggccgggaacggcaacaaaagcccattcaccctcctctttgagaatgatcacttcttccccgaaaagcacttgcgtttggacaaggttgtctgtgcatagttgaagccgctcttcatatcccatagacgccagccattttctgatttgcggcgggttttcgagcaccggtgcatcatacgggcggggagatgacggcagcgtccatacattggctgccgccgctgtaacggctgctctcattgtttcgcctcctcttgtatcgacacgccggtaatgcccagacccggttcatccgggatcgtaatctgactgccgctgtatgtgatgccgccttttatgaagtcatttttcagcataagcggcgcatcaaaatcaaaccttgtaacattccgtttgcccgctgcaaaatgggctgcggcggtaatgccgagcttcgtctcaatcatgctgccgaccatgcattccacgccgcacgtttccgccatcgcattgatggtttccgcctgctttatgccgcccgctttcatcagcttaatattgattaaatcggcgcttctcgtttgcagtacgtgaaaggcctgacggggcgtaaagacgctctcgtccgccataatcggtgtgtctacggcatctgtgacccgtttcagcccggcgatatcgtctttatgaacaggctgttcgaccagctcaatgccaagtccggcgtcttccatctttcggatcgcggtcacggcttctttcggcgtccagccttggttcgcgtccagtctcagtttgacggttgcgccgacacgtgatctgaccgcctgaatccgcgcgatatcgtctgatatgtcacctatgccgacttttatttttaaaatatgaaatcctttgttcacataacggtctgcatcccctgccatctcctcaggagaattgacgctgacggtaaaatctgtttccatcgtattccgataacctccgagaagctgataaagcggctgcccgtgcatttgcgcccatccgtcatatacagccatatctaccgcggcctttgcgctttgatttcttaccaaaagccggctgatgtcatacaaaactgcttccctgtcagaaatgttccggcctaaaagagcgggcttcagtacatcgcaaacggcgctttcgatacttgctgcgctgtcgcctgttataacaaccgtcggcggcgcctcgccccagccggtcagaccgttgtcaaatgtaatcttcacaatgaccgattcagcattgtaaaccgtgcgcaaagcggtcttaaacggttttttcagcggcacggatatccgtcctgtttgaatatctgttatcctcacgtccggtcactcccttcccgaaatccccgattcaattgttaccgctttggccgccgtatccataaccgcgcggactccgatcggaacggcgaagctcggcgaacaatggccgattttaaagcctttgagcgcgggcttccctgatttgacaatgtaatcgttcagcacttgctctaatgtgagggacttttctttattcttcggttcgcatttgtgaaaatcacagactagaattcctgctgcgtctgatagtttgccggccattttcaattgattcagcattctgtcgatttgatacggctcctcatcaatatcctcgataaacagcagtttgtctttcgtatcaatttcaaacggcgtaccgagtgtggatgtaataagcgacagattgccgcccgcaagctctccctcggctcttccgtctgtcagcacctccagcggagaaatatcctccgtataggtgaattccgtttcttcgaaaagctgatgatacgatgcctttgtcagcggatcagcatcttcaagtcccacatccgtgctcagcatcgggccgtgaaatgtgacgagtcccgtattttgatgaatggcggtatgtaaaaatgtaatatcgctgtatccccagaaaattttcggattgctgcggattaagccgaaatcaatgtcagcggcaatgcggcccgtgccgaatcctccgcacgcgcatatcactgctttgacattctgatcactgaacatgtcatggagatcatcgagacgcgccctgtcttctcccgccaaatagccgtggcgggtcttcagcgaccggccgagtttcacttgaaggccaagctcattctctaaaaaaagcagcgcgttttgtaaagtcccgctctcaggggggcttgcgggcgcaatcacaccgaccgtgtcgcctttttgcagtgcttttggtttatggttcatggctttttcaatctcctctcccatggattgaaaagtgaaacataccgctcctttaacggcaaaagagcggtatgtcgtttccgaggtgatatcaggacttttccgcccacttcagatcaacgtaaccgacggggtgccggacaatgcccttcacgccgctgttttgcagatgcacctgattgtaaaaataaatcggaatgatcggagcctcgttcatgagcagcttctccgctttatgcatgagcgcaaaacgtttttttgcatcggcttcctgttttgcctgcttgatatagctgtcgtatgtctcgctgccccagccggtgcggttcatggaattgcccgtctggaaagcctcaagaaaactgatcggatctgcgtaatccggtaaaaatgaactttgagagaactgaaacttcagccctttttgctcctctaaaaagacattccattccatattggcgagcttaacgtctataccgagcacacttttgagcttctgctgtaccgcttccgctatttttttatgctccggctttgtgctgtatgtcagtgtgacggcaggcagtttgtcataatgctcttctgccatgcctttttccagcagttttttggcttctgattcatccggagttaataaactgccgcctgcttcgcggaaatctttcccgtcaggctgcggaaaccccggggatacaaaggcatgtgccggcttttcactgtttttggtcacataatccgtgatttctttctgatcaatagccgcagcaaacgcttttctgatcttttcattttggaacggctccattttaacgttaaagcgatagaaataaagtccggcctgatcccacgtgcggacattttttccgcccatcagctgctcgctcagctctgccggcacaaaagcggtatccaaatctcccgactggaacatctggtagtcggtatttcggtcactgaccatcgcccatgtgactttatcaagtttcaccgtctttttatcccaatacgtctcgtttttgaccatcgtcatgctgtcgtcatgcttccattccgtcagcttgaacggcccgttgccgacaaaggttttcgcttcagtgaaccatttcggatcagccttagcgaccttttcattaatcgggaaatacgccggattggacacgacgctcagaaaataatcctgcggtgccgccaatgtgacgaccaatgtttttttatcttttgccgtaactttcacgtcttcttttttgccttttccgctgttaaattcttccccgcctttgatcatatagccgagaaatgcggaagacgctcccgttttcggatcgagcatccgtttccaggcgtacacgaagtcttccgccgtgacgggatcgccattggtccatttggcgtcatcacggagactgaaggtatatgtcagcttatcagcggacaccttccagctttttgccatggccggttcgggcttattatcttttccgagccttgttaaaccttccattatgttattcagcggctgccaggaaacattattaaacccgatcggcggatcaagtgaggtcggctcattttcgttattgagccggagcactgtttcatccccctgttcttttgctttgccggtttctgttcccgcctgctcattggccgtacagcccatcaaagcaaacgacacaacagcaatcactccgattgcccatttctttttcatttgaatccccctttttcctctgctgccttcagctgtttgtgcttttgcctctctgcacggtcatcctgaagccaacaattgacgaaatggcttttggatttcacggttgtttccggatataccttttcacagacgatcatcctgtccgggcagcgggcggcaaacgggcagcccggcggcggatcgaataaatcaggcggcgtcccgtcaatcggcgaaagctcactatcctccatatccagccgcggcactgagaagagcagcccctttgtgtagggatgagcgggccggtaaaaaatatcatgcctcgtgccgatttcggcgatttttcccgcgtacatgacggcgaccctgtcagcggtctgagcgacaacgccgagatcatgcgtaatcagaacaatagatacgcctgtttttctttgaatctttttaaataattcaaggatctgtgcttgaattgttacatcaagagcagtcgtcggttcatcggcaatcatgatttccggctcgcagatcagagccatcgcgatcacgatccgctgtcgcatgcccccgcttaattggtggggatactgcttcaggcgggatttcgagtcagggatgccgacaaggtccagcatggcgagaacctcggattcagcttgttttctggtcatgtctcggtgttccaaaagcgcttctgaaagctgatctcctacagtcaaagtcggattgagcgccgtcatcgggtcctgaaagatcatagaaatgtcacgtccccgtattccccgcatttcccgttccgtcatttgacaaaggtctttctgtttaaattgtatgcttccggattcaatctttgccgaatgtttcggaagaaggcccatcacggcttgtaacgtcacgctttttccgcagcccgattcaccgacgatcgcaaacgtttcacctttatataaatcgaagctgacgcctctgacggcttttacggtgcctccgtatgttgaaaaagtaacatgcagattttgaactgaaagaacttgctgcgccatttttcctacctcctcaatttcgggtctaacgcgtcctgcaagccgtctccaagcacgttaaacgcgtacatcgttaaggaaatgaaaaaggcgggaaaaaacagccgccaccaatggcctgataaaatcgccgggagcccgtcgtttgccatgactccccagcttgcaaacggcgcttgaatgccgagtcctaaaaaacttagaaatgattccgcaaaaatcgccgccggcaccgtaagcgtcatttggacaataatggcccccatcgtattcggcagcagatttttcttaatgatccgaaatgttttcgccccaaacgttttcgaagcaagcacgtgttcatcatgcttcatcctcaatacctgtcctctgacaatccgcgccatgccgacccaccccgtcacggtcagagcgacgataatagaaccgagccccggtcccatcagcaccattaacaaaatgacaacgagcagatacggcaatccgtagagaacctcgatgattctcatcatggcgctgtctgtccgtccccctttgtagccggcgatgcctccgtaaatgacgccgatcaaaaagtcgatcaaggccgccatcacaccgacaaataaagatatcctcgctccgtaccacgttcttgtaaatacgtcccgtccaagctcatcggttccgaaccaatgtgaagaagacggcggaagattctgctcggcgagcgtctgccttgtcacactgtgcggtgatatcaccggaccgaacacagctaatagaaacaggcaaaataaaatcacaaggccggccatcgccaatttgttctttttaagccgccgccacgcatcctgagtgtaagacaggctcggacgcttgaccgactcggcttcaccctttctttccatgcccggctgaaaccattcatcaggcacttctgtgtgttttaccgtttcctgcgggagattcatcgggatcaccctttcttatgaagttttatgcgcgggtctaacaggccgtatgccaaatcaaccagaaacagcatgacgatcagaatcacactgtaaaatacggtcgtccccataatcaccgggtagtcacgctgattgatgctttccacgaaatatttgcccattcccggaatggcaaagattttctcgatgacgaaactgcccgtcaggatacttgcggcaagcgtgccaagtactgtcacaacaggcataagagcgtttttcaaggcgtgtttgatgataattttgacaggagaaaggccttttgcttttgccgtgcggatataatcctgagtgagcacttcagccatgcttgatcttgtcagcctcgcgatgatggccataggtccgacggcaagcgctgcagtcggcaggaccatgtgaactggactcgtccacgtagcagccggaaaccatttcagatgaaccgcaaattgctgaatcagcagtgtcgccataataaaattcggaatggaaatccccagcaccgcaaggctcatggccgcataatcgagaaatccgccgcgcctcagagcggccgttatgccgagcgcgagtcctgaaataacagcgatgataatcgccgttatgccaagctcaaatgaaacgggaaacccccgttcaagcatggcgtttacactgtctgacggttttttaattgaaggaccgaaatcaaaggttagaatggattttagatagatggcgtattgagtgataagaggttcgttcagatggtagtaggattcgagatttcgctgaaccgcttcgtttgtgccccgctcttcgttaaaaggcgagccgggtatcactttcatcatgacaaatgtcagagtggtgatgacgaggacggtcataatcattgcgataaaacgtttgataaaataccgaagcaatgccgttcacccctttaacagaatgttgttctcatggcgagttctgtcatgacgagcatggcctgataggcttccggcatgtcttttgcctgaaattgaacgattgtcgttcccggtatgatttctgtgcccggcattaaatgggcccattcagcctgtccgtagttggcaaattcaatgcctaagaccggtctttcaggcggagtgagcggcttgaccttatctttatttttgagcgcataagctgttttttccgtcaggagctgcccggctttcagaggagacaggcatttaaccgcggttcttgaaatggtttgcttgacggcggctgtcgtcacattcggtatcagctcctccgcttcttttgcggcgcaatcatccccggcagccataatcaccgggacatcgtaaaatccggcgagataggcatttaaccccagttcaccgaccggcttatcatttatgtaaaagtgacgcacgccgaatatcatgctgtgcgacatgactcccggcattgaggctctcgcatggtagccgataaacattgcgccagaataggattcatcaagcccctgcatcatagaaaacggcttgacgtcccctgtgatcagctctgcctcaggatgaagtttttctgcgagcagattattcatctttgaatggctgtcatttacggtcacttccgtgcacccgttattaaacgcttctgcgatgcaccagtttgcttcctcggtcatcagaaccctgccgcgctcataattgtgcatgcgggaattgacaaatgtttcatccggcagtccagatatcccttccatatctacagatagatacagtttcatgtaatacctccttttttatttaaaatttcgatattaaattatgaatattctaacaaattatattaaaaaaggatgaaacatgcaatataccattctgccattataggaaaaaacaaacccttttcaccgggaaaagggtttgctgatagaaaaagttacatactgttttcggggtgacgctgaaactgtctgaccgcacttctgtattcactatcgggaatgacctgatgcctgatcggttcagtagttttccgcggaggctgttcagcctcctggttacggacggcgtgcggtttatgcgccagcttatgtcccatgccggtcgcattcatgacaaatgataaacacactaaaagcaggcttaagatgaaagcaataaggaacagatcgctgtatgtccccatcagcaactcatgcggcgattgtgtgccgtgcgcgccccaaagcatgccggaagcatctcttttggtaaaataccctattaatacaggggcgcccatataaatgaacagccgcaaaaactgaactgccgtcatgcgtttcaccagttccggaagcggtcctcctaacgcggctcccatcagtccggctgccacgataagccctgttccggccgccagcattacgaaaagccccgcaaatagaataataggcatatgatgatccgtcgtcatccattgaaaattcacgaacacaagtataatagagcctgttatcccgagcatgcccgggccgactttatcatatgctaatgcactgatgacagcggcaatggccacgcctgccaaaaggctcgcatataaaaatatcaaatgagtttgtgacatatgatacgccgcctgaagctccccgcgaaatgcagaaaggctgaccgctattgagatactgcctgcagcgatcataaaaactcccagaatcggctttggaatcagcataagtttaatcgaaatcagcgcatgttcgtttctgtactgcataatcagcaagatcagcagaatgacgaagcttcctccaaatcccgccaacgtatgccatgacgagaaaccccatttcggcagatgaataaatgtaaaggcagccagcacggctgatacacccgctaacagaaaaccgaagccgtcaaatggagatctttctgcgcctttatgagcatcatcccgcagccacatatagctgaaaatgaagccgcaaaaagacagcagaccaaaaatgccgaacagccaatgccaatggccggcgcttgccgcggccgtgcctaatacggtccccataatgacggacccgtaaaagccgccgattaacacaaataaggcgtaattgcggcgctcaatcggaaacgaaagcaccagcatcggaatcataatcatcagcatagtgcccgcagcggctccctgtaaaaaacggcccgcagcgagcgggtaaatatcattcgtacaaaaagctagcagcgctccgatgacagccgctgccatagaaatcatatagacaggccgggagccgaacctttttcttaaatacggcccagccggcacgaataaggcaaatgccatattaccgataataatcggatgaaaagaatcatagtttcctccgccgaccgtctgccggacaaggctttggacagccgaaagagcggtgttcgacatcagtcccggcccgaccgccaacacagcaagcagagaaataatccagtgatgtttttctttcatttgacagctcctttcttaaatttgacaacgtaaaaaagctaacagatttcccccattagcttgacagaattttcatatcttttcatgtgaaggattgagcataatctatcatttattatttcaaatccgatcgaaattgtcaatataaagcgccccgtccaattacgtctttttcacaatttcccacaatcttttcattattatcccacactttttgtgtaagatggagtcagtaataataggcaaatcatgctatgatgaaatagagaaacggagtgaacatgatggataactatcgtgatgaaaatcggacagaccaaaaagaacaggaagtccttttagcaaaagaaaatccgcagccggccagatattcagcgacggacgaggacaagaaaaaacgaagcttcggctggttcagaccgctcctcggcggggtgatcggcggagggctcgcccttggcatctatacatttacgccgcttggagaccatcagacgcaagatacgtccaatccggctcccgctcaggaaacgtcatctgtaaccgctaaacagacatcttctgattccggcagcagcaaatcgtcaagcagctcatcagcaaattcaagcagcatttcaaatatggtggaagacatttcaccggcgatcgtcggaatcaccaatctgcaaaagcagcaaagcagttcagatttattcggattcggatccggttccggttcgaactcaaattcatcgggtgaagatgccgaaacggggtcgggttcaggcgttatttttaagaaagcaaacggcaaagcgtatattattacgaataaccacgtggtcgaaggcgcctcttcccttaaagtgtcattatatgacggtactgatgtaacagctaaactcgtcggcagagactctctgacggacttggccgttttagaaatcagtgataaacacgtgacaaaaacggcaagcttcggcagctcatccgctctcagaacgggtgaatccgtcatcgccatcggtgatccgctcggaaaagacctttcccgcaccgtcactcagggtatcgtgagcggcttaaacagaaccgtctcgatttctacatcagccggtgagtcaagcatcaatgtcatccagactgatgccgccatcaatcccggaaacagcggcgggccgctcttaaatacagacggcaaaatcatcggcatcaacagcatgaaaatcagtgaaagtgatgtagaaggcatcggctttgcaatcccgagcaacgatgtaaaaccgatcgctgaagcgcttctcactaaaggacatgtggagcgcccttatatcggggtaagcatgatcgacttggagcaagtgccgcaaaactatcaggaaggcacactcggcctcttcggcaaacagctgaataaaggggtttatattcgcgaagtggcgcagggatcgcctgccgccaaagccggattaaaagcagaagacatcattatcggcttaaaagggaaagaaaccgacacgggcagcgaacttcgcaatattctctataagaatacgaaggtcggcagcaccgtggacgtgaagattatcagaaacggcaaggaaatgacgaaaaaaatgaaattgactcaaaaagaagaaacaccttcttaacaaaaatccagggcagcggccttggatttttttatatcaatgaaactttcagcgcaaaccgtccgtatgaatagtgtacaaaggaggatacatacatgaaacattccggacttttgctggtcgttaccggcctgatcttgctgcagctgagctttcagcttcctcatcaaaacattgcttggggcatgacgctgggtgcaagcattttattgaatctgacgggaaccggactgattatgcgctctttgcacatgcaagccagccgcagatgattgaaaaagccgcgggacactcagtgatccggcggctttttatttcagacataaaagcaccctgtccgctagaaggacagggtgtttcggttaagacatatgctgatcccgataaaccttttcgtttttaatgccgtacgctttttgcacgatatagagcggacggtcttttgcttcgtcataaatccttccgatgtattcgccgatcataccgagaattaagagaacgatgccgctgaataaaagctgtatcacaatcagtgaggaccagcctgtaatggtgctgtctgtaaaaagtttcatatataaaacgacaaacatataaagaaaacccgctccggacataatcattcccgcatagcttgccgccttgagcggtttatgggagaacgttgttataccgtccatggaaagcttcagcatttttttaagcgggtatttcgtttctcccgcaagcctttcatcgcgttcatattcaacagcagtctgcttaaacccgacccagctgacgagtcccctgacaaatggatttttctcttttaatcttttcatttcgtcacagacttttctgtccagcaggcggaaatctccggtatcgagcggaatatcaatatcggtcacgctccgcagcagccgataaaacatagaagccgtctgtttcttgaaaaaggtttctcctttccgtttcgttctgacggcgtacaccacatcgtagccttctttccactgttcaatcatatcaaggattaattcaggagggtcctgcaaatcggcgtcaatgacgatgacggcattcccctctgcgtaatccatgcctgcggtgattgcgatctggtgaccgaagtttctggaaaaatcaataattttcactctcggatcaatcagactgtgctctcttaatatctcaatactgcggtctttgcttccgtcattgacaaagatcaattcataatgatcttttgtttgatccatgacttctttcaaacgttgataggttgtctgaatgacgagttcctcattataaacggggacgacaattgaatattgaatatgtctgctcatgtttttttcctcctattcatcagattgcagttcgtataatgaggctgactgattcattccgcctgggccgccgcccatccggttgttttcacttgaatccttactggtttcagtatcagctgcatcattatttttcgttttctgatcattgcttgattgccatttatctgaagatactttcttgccgtttttctcaacccattgcacaatatcattgtttccgcctttgcccattccggatgttaagaagtattttactttcccttcttttacgagctttttaaattgagtcagcgtgatggccgggtcagatccgctgaatccgccgatcgccatgacggcttttttcgtttttataatgtaaggcgccgctgtgttggaatcggttgttgcaaacagatagtccgctccggcgttatgtttctctaaatagttgatcagtttttcatttacagatgcgttattcatccccatgccttttttgcttgttgaggcgagctgagggcctgtttcaggcaatgagctgttgcctccgtacagaagcggtgtgctcgcccaataaatcggcattaccagcaagacgagaagggctgcaagtgaaatataagaactgagcggtttttggcgctgtttgaacacgaacagagcgattgcagccgcagcgccgatcacgcctataccgatgctccagcctgcaccgatttgatcaatgtagtttctgagtataaacagctcaaatccggttgtcgcaagaatggctgccggcagaagccaagttttccatcccgcctgcttgcggtacagatgaacaagggcgacccaccccgcgccggtaagtgccgcaatcggaggcgccagcataatgagataataatggtggaaaaattccgccacactgaagaatccggcaatcggcacaagccatgctgcccaaaaaatcgtttccttctgttcttctgacaatcttcttctttctctcgccccggcgatcaataaaccggccattccaaaaatcgcaaacggcaagagccagctgatctgatcagataattccgtttggaaaagccgcagcggaccaggggttcctgtcccgaacattcctgaacctgattgcattttcgagccggtgcctgtaccgccttttcctccgctgctaggaggacctccttgaccgctgcctggcatttcgcctccgcttggcatttgtccgttagacggaggcgccgtcatgctgccgttttgtgatttgccttcacttgatgaactgctgcttgaagactgaccgggcggtgcttgcattcgtgaagaaccggcggaagaagatatcccttttgaagcgtttccgtccggcccgccctggccgccgcctgaattttggcctgtcagccgctgaatcccgttatatccgaaagccaattccaatacggagttggtctggctgcttccgacatatggccttttgccggccgggatattgtcaacaatgagaggccacgacaatgaaacggctgctaatacggccagcgcgcttaccaatgaaatgatttttttcttaatggtcgtgtttgccgcaatcatatagaacagcaagaaggccggtaaaatcatataagcctgaagcatttttgtattaaagcctactccgacgacaaaaaacgccgccagaagccaaatcagtctgccttttcgaatcgctttaaagagaagccatgtggcgaacaacaggaaaaataccagtaaagcatcaacattgttcgtccgtgcgactgctacagcgatcggcgtacatgccatgacaaatgaggcgatgcgcgccgccgtttttccgaacgtcggctttattaataaatacataaagagaactgagcctacacccgccaatgcctgaggcaggatgacactccacccgtgcataccgaatatcagcgcgctgatcgtttgaatctggtatgtaacaggcggtttatccaccgtgataaacccggctgcgtcaaatgaagcgtaaaagaaattatgaaagctttgaagcatactcgttaccgccgcggtgtaatatggattcaccgtatcgtcattccagatgttatacatattcaagaatgcggaaacgagtaaaatgagaatgaagactgcgtctatctcgcgttttttcatgttcacctgtgttttcactccttttgttttaactttgaacaagtgtaacaaccaaatatgaaaaatttattaataaacaaagacaattattttgccgtttacaaataggtaaaaagaatgacaaaacgggtaaaaaagcaaaaaaaagatgcccccgtcaagccgggaggcatctgtctttatttctgatttactgaatcggtttcagccgcgcttctatttcagaacggcggtgttcgagataaggcgggagcgcaactgttttgccgagctcctcaggtttttcatcgaccataaatcccggaccgtccgttgacaattcaaacagaattccgttcggttcccggaagtacagcgctttgaaataataacgctctacaatgcccgagttggtgaagccttctttcgtgattatgcggtgccataaagcaagctcctcctcattctgaacgcggaaggccacatgatgcacgctgccttttcccggacgctcgcgcggaaggtcgtttctttcaatcagatgaacttctgtacgcgcacctccgtttccggattccagcaccgtaacagtgccccggtcttcatgcgtttcttttccgatttcagtaaagcccagcacatcggttaacacacgcagcgtcgcctctgcatacgggacggttaattcaacgggaccaagaccgcggaaagaatattcttccggaatgccgctttgcttcaccgcttcaccgatatcttttcctttttcgtcagccgtcagcacaagccgctgtccttcatgatcctgaaaagcgagtgtgtctctgcccgctgtcttccggatgtcaccatgagcgacctgatgctcttcaaatcgttttttccaatattgcagtgcttgcgtatccgggacacgcaggccgatcgaagaaatactgtttgtccccgcatgaaacggcgcaatccgcgggatttcaaaaaacgtcagttcagatcccggattggctgtttcatcaccgtaaaacaagtggtacattgtcggttcatcctgatttacggattttttcacaagcttcagccctagaatattccgatagaaatctaaatttttctgtgcatcagctgtcaatgctgatacatggtgtattccgttaactttcattatgttatcctccagtcaattatctcgatttcgagatattttctatatacaatttatgttatccggatcataaagtcaatacatctgcttctcagacggtcagcagattgcccccctcaaaataacgaactatagttgttacaaatccgttaatgttcgcttttaaaacgggatattttccttctcaaaagcagaaaccttgctttttcaggtaaaaacactaaaattagaaaatttattttattcgtgtttcagcaattagggtttacaatatgtaaaatagttttttcagcatgacgattttacatctggagggaaaggatatgcagattgaagaaaacggactaaaaaaagagatcggccttaccatcgccctctcacttgttatcggcaccatcatcggttccggcgtatttatgaaacccggcgccgtgcttgcctactccggtgatgcgaaaaccgcgcttatcgcgtggctgttaggaggcattttgacgcttgccggcggcttgaccgttgcggaaatcggcactcagattccgaaaacgggcggactttatacatatcttgaagaagtgtacggtgaattttggggctttttgtgcggctgggttcaaattattatttacggccccgccattatcggagcaatcggtttgtatttcggctccttgatggcccatctgttcaattgggattccggctggtctaaactgatcgggatttcagccgttttgtttttaagcatcattaatattatcggaacgaaatacggcggcatcgttcagggaattacgactgtcggcaaattaattccgattatctgcatgattgtgttcggcctttggaaaggcgatcagcatatttttacaaccgtcacaagcagcatgtcggaaatgaatttcggcgctgccatactggctactttgtttgcctatgacggctggattcttcttgcggctctcggcggggaaatgaaaaatccggaaaagctgctcccgaaagcgatgacaggcggactgttggtcgtcaccgctatttatcttttcattaactttgccctgctgcacattcttcccgcgaccgatattgtgaaactcggtgaaaatgcgaccggcaccgctgccggaatgctgtttggcgacatcggtgggaaattgatcagcgtcgggattatcgtcagcatcttcggctgtttaaacggaaagattctcgcttttccgcgtgtctcatttgcaatggcggaacggaaacagcttccgtttgccggacagatttcacgagtgcatccgacatttcgcactccgtggattgccgtgtcatttcagatcgcgctggccatcatttttatgatcgccagcaatcccgataagctgtctgaaatctctattttcatgatttatattttttacgtcatggcctttttcgccgtgtttatcctcagaaaaaaaagcggcggaaaaccgcgcgcctacagcgtgcccctgtatccgatcattccggttttggccattgcgggttcactgtttgtactgatcagcacgatcattacagatacactgagctgcgggctgtcgatcttgatcggcctcgccgggttaccgctttatttttggctgaaaaacaatagaaaaaactgacaaaaacggttccttttacgggaaccgttttttttcggcaaaatcacgtgtaaaagttgacagcaaattcacatcttttgttatactttttaggcaagatgtctgaattcgaagtatgttacgtttttttggcgaagtgggtaacataagaaaaacaggatgagacacgtttttacgaaaaaatcaagaggcgtttttttcgactttatctgttttttttcgacaaaaggctatataataatttgatgtgtgcattgtctcattcaaacaatggagggtttttaatgataaaaagaaaaaaagataagttctcactccttttaacagaaattgcaaaaaacatagacgaaaccgcagaatattttgtcaactttaaagtgacgaaccagacgactttaaaggaatttgccgatacgttaaaagagtttgaaacaaaaggagataatcatgttcatgtcatgatcaaagagctgaacaaagcttttatcactcccattgaacgtgaagacatccttgagctgacaaacagcctcgatgacgtgcttgacggaatcgaacatttttcagcgatgatggaaattttctcgatcacctcttctgacgaacatatcgataagttcagcggatacatcagagagtgcgcgaaagaaattttaatcacgattgaactgcttgcagaaaaccgattaaaggacattcaccctcacgccattaaaattaaggaatacgagcacagctgtgataacctgcaccgtaaatcattaaaaaatctgttcggcacagaaaccgatccgattaaagtgattcagtaccgtgagatttacgaaacgcttgaggaaattgccgactcttgccaaagtgttgccaataaccttgaaaccatcattatgaaaaacgcgtaacgaggggttataatggatactctattacttttaacgatattaattgtcatatgcgctttggtatttgacttcatcaacggatttcacgatactgcaaacgcaattgccacctcagtttcgacaaaagcgctgaagccgcggcacgcgattatcatggcggccatcatgaactttctcggagcgatgacatttaccggtgttgcgaaaaccattacgaaagatattgtgaatccctatacattagacaacgggtcggttgtcattctggcggctttgatcgccgcaatcgcctggaacttgatcacatggtacttcggtattccgagcagctcttcacatgcgattatcggagcgatcgccggcgcggccattgcagcgtcaggttttgcatcgctgaattataaagggtttattaaaattatcgaagcgcttattttttcaccgatcatcgcctttgttctcggctttatcgtatattcgatcgtgaagctgattttcaaagacagcaatttggcgaaaacaaataaacgcttccgcagagtgcagattttgactgctgccattcagtcctatacacacggaacaaacgacgcgcaaaaagcgatgggtatcattacgatggcgcttatgacggccaatttacataaaagtgatgcgattcctttttgggtgcagctctcctgtgctctggcaatgggtctcggtacatccatcggcggctggaaaatcattaaaaccgtcggcggaaaaattatgaaaatccgtccggtaaacggcgtatctgccgacttaaccggcgcagccattattttcggggccacgtttatccatctccctgtcagcacgacacacgtcatctcgtcttccattctcggtgtgggcgcttcccaccgcgtaaaaggcgtaaactggggcacggctaaacggatgctcattacatgggtcatcaccctgccgatttcaggtacactcggcgccatcgccttttttatcttagatctctttttctgattacagcatccgcttctttacaggagcggttttttttgtgacaggaaaatgatgccacagcatagaatgaacatagcagaccatttttcgaattgtgagggatgctcatgcttttgttttatcaaatcatggtgtggacgatggcggccgcactcattttatatgtgtatgcatcctggcggtatgaggcaaaggtaaaagaaaaaatgtttgccatccgtaaaacgtggtatttactatttgtagtaggcgccatggtctattggacatatgatcccgaatcgctctttgccgcatggaggcaatacttgattgttgccgtctgctttgcccttattgatgcgtttatctttttgagcgcgtatatcaaaaagctcgccggcaatgaattagagacggatacgagggaaatattggaagaaaataacgaaatgcttcactcctatcttgaaaaactgaaaacctatcaatatctgttgaaaaatgaaccgatccatgtatattatggaagtacagaagcttatgcagaaggcatcagcagactgctggccgcttatgcagaaaaaatgaatgtcacggcttcattgtgcgactattccgcacaatcggataaggaccgcttgacagagcatatgcctgatgcggcagacgttcagtcccgccttaaccggaaagacgtctactatgatcaaaaaggaaggcttgtgcttattccgtttacagtccagaaccgccagtatgtgatcaaactcacgtcagaaaacctgttgacggaattcgattatttgcttttcacatcgctaacgagcatttatgatttaatgctgccaatagaagaggaaggtgacggataatggagcaggcgtttcaaaacgggcagccggaacaaagagcgaaaccgttcaaaatgtttaaaaaacgctcaatgacaagtatcgcaagttaccaggtcagccctcacaccgccagaattttcaaagaaaatgagcggctgattgacaagtataaacaaaaaaaagcttgattacactaaggacaggagacacgactcttgtccttattcctttttcccttatatttcatataataataccaacaaagagatgcgacaggtgatgatgtgaagaaaattgtaaggcgcgtaaagtttgtggattacggacggttcgggctttccgcttattcgctgaggatgcgggcgaggaatctcgggctattaaaccgattaaaaaagaagaaaggctgaatcccgggatgttcgggactcagcctttttttcttaaagctgctgcaaaattttcgcttttactgcggggccgtagatgccgtctgacggcagtccgtttacagattgaaagcgggcaacggcatttgcggttttcggtccgtagatgccgtcaatgccgttattggcagctcctttttcaggataaaaataaagcgcggcgagcgcgttttgcacctggtataccttttcaccggatgtgtacggctctgtcagctgaatcacctcatccggaagaggatacaatccctcaacaggcgggctgacaatcagcacttgtccgactttaatcaagttcggatcagcgatgttattccatttttgcagatcggccacactgacgccgaattttcgtgcgattgccgacagcgtatctcctttttggacagtatacgtctgtctattttcagaaccgattcccgctttaaactcatcccatgtatccaacagtcttctcgggcaaagctttcctgaccaatgcttgtgctcgacgacattcgcaagcgggatgccgtgcgacgtcattaatgtgcggatgagccattgggcgtttgccacagcctgtgaaaagtttccgtctgaattttcacaaatttcaataccgatggatttacggttgccgtccccgtttccgtctccggcatgccagccgttttcgttcagcggaagatgctgataaatttccgtatcatcgactgtgaaatgccagcttgtcggcgtatcgggatttttcacatagctcgcgtgacttttggcgtttgcgccggctgcggtattggccgtattatgcaccgtaatgtaaatcggtgtcattgcatagcctgggcggttattgtttccctctggaatgaaatcctgtgtgattttcaccatgttttcatctctcctatttcgataaattgtttatttttaataaagcctgctgtttcttcccttttgctgtaacgtaattgtttttaaaccaggcggccgcagtcgttgcgatcgtaaaaatagccgacccggcggcatacagtgtatccgcaagctgattgacctgatcctcctgaatatccagcggcgatttgccgaacatcagcagtgtttggttcaataaagcaagcaaaagaagcaccgtcctgacgaccgtgcctttgtccgcgaatttcatatttgtttcccccttacttttgcagcagattgtacatgatggcgatggctccgccaatgacgcccgtgcagattgctgtcacgatggctcctgtaatggtccgcttaatccatgttgtattctcttcaattttgttcagcttttcattcagcgtcatgatttgctgatcctgccggtctgatacccgctctaaagcggctacccgctgttcaagcaccttttgttcacctttgatgcctgcgaattctttttgcaccgtttgttcatccagaagcacttcagctccctcctcttacattgttctcacctcccttcggaagcttgattcttttaagaaaatgccgtgcctttgacagaaaggcttccgccggaaatgctcttgatttccatgacgatttctttaaagccagcaatatcaaaagtccacacttcttctgtgcctgacgtgccggctgctgatgtcccgtcgtcagatctgattcctctgatcggcacatttttccccgagatggatctcccccaaaacgcgacttcgcttgactcggcggtgccggtgatttcgacgagaagttttttctctttagttacagaaaaaacagatccttcggcggcgctttcggtctgatgatgaaaaacaaagtcgctctgactttgaataaagtctaccggtaaagggttcgtcttttgcaggtgaatatcgatttctcccgccccaagtgattgataaaggacaaattcagattgctgcaaattcccattcacatatcggaaacgataataccttttagtaagatacacccattcagacgcagaaaactcaccaggggcaacattaactgcgacagtggttgaccatgaaaaattattgtcactttcttcaataaacagcgtgcctccccggtcagcataggcaaatcctttcactttggaaataagcactgcaccaagacggtcctgtccgtactgattgtagacctctgtcgctttcaaagccgagttggttaagagctcagccactcccgataaatgggatacaggtgttacaaaatctgttttttctcctctgtacggctttaccgcacctgcttttccgctccgatctgcgggaaactcatattgatatttcacggtaatcctcctcctttttctgcttatttcaaaaaagaccaaaataaaaaagccttacatggctttacctgtaatctcctcgtattgatcggacgatatgagcgactgacgaaccccttcttgcagatcttctatcgaacagtctttataatgcagagcttgtttcaccatatctgccgtcgcccactgataatgaagggcaatcacccaaaaattcattatgcattttctcctttcaatgacaaaagtgtaagcttaacgtctgacagctcatttccgagcatagcgttcagctcttccagctgcttgcgcgcaagtttttctcttgacagctcctgtgcaagcaattctatgtgatcaggcggatcatatggcggatttttttgcagctcctcccaccacgcctcaagctgttcctttgtaggtatgggagcgttgaggttccatttttcaatataagattcattcccgtcatttcttaaaacaaagtcttttaacggaactgcatcaggatacttatacaagattacatcaaataaaaccatataaattccccctatactgtcgggtaattcttcccgccaatttccaaaatatcaaaataatttttccgtccatcggcatcttttacataacgtgtgacggtgccgttataaccgatataagcatatatttcagcataatcaccagcatcaagcggcactgtcactgttccggtcagtgtagcattgaattcatttgaatctgtactgtctttcggaggaggcattctaaaatgatccattaatttgtattgttctccattcacatatacgtataattcaaagttagaatattgctgtgtgttttctatataaatactgccgccgaccaggtacataccggaatgctttgcgataaatctactatttttcacgtcaaataagttatcactatcttttattttacggttgaaaaggatcttattaacctcaccttttttcaactcttgccgacctgttgtaccgatattagcgtgagcaaatcccgatattttttcccatgttgtccagccggtagtatcccaccattgacgaatccaagtacctgtttgattattctttccgtttctctcatcaccattgccgtaaaagtattgaacgaaacgccatttattcagattttcatttttcacaaagccatatccaagagggtatcctgtgctgtttccctcataaatccccataaaagtgattccctctggataatcagtcccaggtgttctggcatcaacaattgttttttcgtccccatcacggtaacaagtcaatctttcaattgaaaaattagtatccgcgtaagttttggcattttgcagggcctgatcagctttattttgagcatcactttctgttccgagcttttgccagccaagccaattattatttaaataattagtatagatattattctcgtagtcagttgcgtaaatccagccaaaaacagctttaccggatgaatcttggttagtcatttgccataatccgcgtatagattttcctccatcaggtgctcccgaattcgtgccatgagcataaaaagttccaatggaagtgcctttactttgaatggcatccagcaaatttatatcgctttcgctgcccaaagaaatagttggtgctccattatcagccgtcaatttcatcaactgccctgcattccatttgtctttgtcagacttggttacatgaatgtctgtttttttggcatgctcgtttacttttgcttgtgctccggcagctgtttcatacggtatccattcagtccaaatgccgttttccagtgtttttctccaaaatcctccatcgtttgaaaaagcggccgcctccccgttattctttgaagaatataggtaaataccgtctgtctgctgaggcggagtatttattcccgttgttgctgtcgagaaagtaaaggttttattttggctggcagcaatctgatgaaaatcctgtccctcagagatattaataaaagcggagccattatcgtttgtcattttagacagctgcccgttatcccacttctggcgctcttctttcgtcaagtgccggtcctgatcttgattgtgctgatcgaaatctttttttgctgcctgctggacgttgtccacgtttccgaggccgatttgcgcctttgtcgttttgtgcgggttgttcatgtcgtttttatgggccgccagatccttgtgggcgtcttttatgcctttttcccagcggttgacgtcgtcttcattgatcggatcgtccggaagccagtctgttttttcttcgtaagccatcgttacaccacctcaaaggtaaatcttaaatccagcgttctgttattgctgagatccaaatttgtttttcgttctgtgatgacgcttcctgtttcgtcaagcatctgcacggtttcaatatgtttgatgccttcttccctgcgtgtgagaacagtgactgcggcttcttttacagaaatgtccgcaatcggtgtttctttgccgtttaacagcacttttgtgatcctgtttttcagatcggctgcggcacgctgtctgtatgcggctgatatcatggtaagaccacctcgttattattgagtgtgacggaataaccgaccttcagttcactgacttttcggtatctccgatcgttgagaatgacccggtctttgatttccagtgtttcgtttaatgcggctctcagtatatacgccaaatgagcgggtttaatcttttcaagtgtttcaatcagctcgttcatgtgctgcaggtcgtcaagctctatatcggcataaaaacgatattcccccgggaacatccgaacgtaagccgacggatgttttaaaaaacggtttaacgcctgttcgatcgcttgatgcgtgatgggcggaatattcgacatcttcgagatcagcctgagccgtctcatgtcctccgtatcacctgattcacgcggtattttcaatattttttcccagcggtcaagcccccacgtcgccgtcgtaataaagagctgatctgtcaaatcgaaaatatcgtgattctgccgctcaaactcaggagcttccgcctgaagcacttccgccatctcttttagccgggttaaaaaaggcgggaggtacgccgtcatctcatcgagtctgctcaagaatgatcacctctttgagggtaggaatttccacgtcactgagcacaagattttccgccgcaccgttcattttgatatcggcgtagtcactgacggatgccgagttataaacaatattgttaatttgtgataaacggacggtgttttcttcgaaggctattttcttaaataaattcaggacgcctttttcaatctccgcttttacatcatcgatcgagctgttcagctcaggcagcacggaagcggaaatttcgatctctttccataccgcgctttccaccgttactgcggctccgatcggcgcctggccttctccctgtccttcatccggatcaatataatcctttactttcttgatcagaatatctgatgccggttccaaattcgcgtttgtgataacgaccttcaccgttccgtctccgttccatagcgggaagattttcgccctgccgacaccgtcaacttcttcggcccactgtttataatgcagtttattcgcgctgactgcctcccggcggacacgggtaaaataacgcgctcttaaactgttgtcgtcttcttcctcacggccgggaattaaaatatcgcgcatgacagccttctcaagcccgggaatcgtatcaagcggcagcaggttttgacctgtaatgccggcattgcccgcatcaccggccgtttcacattcaagcgttccatcctccgtatattgaaaatacaggttatcgacgaagaatcgggagcctggcggaatggtgattcccggtgtgaattctccggctctgaccgcttttgtggcagccgttcgttcaattcctgcttcagcagcccgcctgtccagaaattcgccctgagccgtatcggaaaaaacaagctccagcacggtatcaagccaaatataagactttgcgagctcagcggccgcaggcgcgagcgcattgtaaatgacgctgccttctctcgtatcaacatctgccgtgattttctccagcattctgtccataatgttgtcaaatgtctgagcttcaaacatcctcacccagcacctcctcaatctcaagcatgccctcatcggcttcaacggtaaaagagacgatgaaggcatcatcttttttctcaatctcaaaattggttacggccaaaatacggtcatcatacagcaaggcttcttctatcaatcttggaatctccatttttttgtaagcatccgtcgtgttctgatctgaaagcacttcctgcagttcatttccgatatcatgactgaaaaccgagtatgaataccgttctgtgtgaagagcgatatagacaaattgtctgattgcgtccagtccgtttatcagttcattggtaatcctgttgttttcaaaatcaattcggtaggtttgtgacgtttcaatggcatcactcgcatcctccaaatcttcaaattcgatttccggtgtcagggccattgcacccgctcctttttgattgttcattaaaaaaagccctcttcagcgactgaagcggcttcctctctctctattccatttccatccggatctctcatgcggaacggataacatttcacgttcccgacattcatcatacaggaatgcggttaaattttgtccagcacaaagaaggactgtccgcctgttaatgcagcggtcatcacccggtctcctgcctggagctgatcatctcccccggacttcagccgcttcggcacaatgagggcatcagacggaatcaacaatttatcgtgatctttcagcttcagctcaagcggcgaaacggaggtcacttcagccggcatcagctccaccggcgcttcggcgtcaaccgccccgacggctaaatgtttaatggcatcgcttaatctcatcaggatgttccctccggaagtgagtttttctctgtgacatcaatcgtcatggtatgttttgttccttggaattcatggcggtccgtatccacgtaataggttttcttcaatccgatttccggaattgagatatacaccggcaatccgctttccaaccccggaataccgatcgcctgtatatttttcagctctttcttaacgccttttttctcagcctgcttcacttttgcgcgctgtttcagctgggcttcgttaatatcatcagaaaccgtttccgtatactgcaaaacgccgaatgttttcatgcctgcgctgtctgcggcggtagccttcaccgttttattgtctttttgcagccgcatgacgacgcgggttgcggtatcatcgatcgaggtgctgtactgataccccgtaatattaacgcctgtttccagcacccatatgtcagacggctccggccattcacgcaagccgagcctgcctttttctgaatagagctgataattgcggcccgtctggctttttgtctgctttaacgcttttaacatcatatcgtaaaggcttgtatcatttttaaaaacgagtgatttaatggtatggcctgtattggcaatggatgtgacgggaatttgaaaatcgctggcaatcctttttaatatttgatcggcgcgctggttggaaaacacgtatacatcctggtttttcacaagatattggagcatatcatatgcggtgaaggcgacggtatgttcatccggcgttcttgcaaagacaatgccgcggaacagttcttttccatcccatttgaacaaaaccgtatccccctctgacacgctgtaatacgtctggctgccctgctttacgacaatcgtcgcttcgatggagcggggcgcctgatatctgtggccttccagcgatacgctttctgttacaagctcgagccactccgtttcttttatgacaaatagttcaatcatcttttcacccgtttcattgcggtatcttcagcttctgccccgggaagatccaatgtcccggctgccggatattccgtttgctgcgctttatcatggccgttttattcgcattccagattttccgccactctgtatggtttccgtaaaacctgccggcgatgtcccaaagcgtgtccccctttttcacggtatacgttttgggcgaggctttggacgggcgcttcgctttcgtttttttcttttgtttgatttttcttggcgaagcggttttatattctttcagtacgatgtcaaaattccggtcgccgatttcattgtcaccttcgctgtaattgaagctttcaatgctgcatgtgacattgattgttgttcctgtaatcaaaaactgaacgggttttttcgctttcatccatgtttcaatttctgaaatggctttttccggcgaaggaatactttgatattcggcaatcgggctgtatcgcttcggaaaaaaagaagagaacgaaatttctttcgcccccggttcttcgataaacgtcacctctccaagtccggtgactttcacggaatcattctgcacgctgtttgcgatatcaatcgcttcagggagaacgggaagccggagcttgtccttcccctgagacagccaaaattcataaacagatttagtcaaaagcaacggccccctttgctccggtataaatatctttttgcagttcatcaatcagcgcctgcttgattttggcggcgagagtgtcagcgtcctgtccgttatgaaaatgctgatcaccgctgaattcgattttgatttcttttgttcccgttttttgaatggtttggccgccgcctttaacggctgcggaaaccgtgccggctgaaagtgccgcgggttccgtctgtgtcgggtcggacacttccatgccgagcgcttgagccgcttgttgaagcaggtaacggccgcggatgccccgctcttcagggatgatccattcccgtttgttcccttcgccgacacgggcgatctgctctttggtaatgagaccgccattggcataaccgacgtaagggccgccgcgggccatactctttatcccgggcacattgttgatcgagccgtatctgcttttaatatagccgatagcggcagcggcgttgtggattgggtttttgatattattcattcccggcgctttaaatgattcaaaggtgctcgggatcgtctgcatgagcccctgtgacgggtggccggcttttgcattgctgtcccataagttaatggcgttcggattgccgccggattcattttgagcgatggtcattaatcccggaagccagcttaatggcgtatgtgtagcgctcattgcagccaaaagccactccttgacgtttccaccggcagcgcccatgcctgaaaaagcggccgcaagcgagcctgcttgtttttcggcgtattttttcacatcaacagaaccaagtccctttacgacaccgactgaagcaaagcggccgagactcatcatgacgcgggaaggagaatggatatcaagttcttcccggaaagcctcctcaacctttttggccatatctttcgctgcctgtttgacttcgcttcctttagaattcatgccggatacgaagctgccgactaagcctgacccccatccgtttgcagaatctctcgattgcagaaacggcttatctacatgtgtgctcacatattgcgccgttcctgtatctttcgcattttgtccggccgaaaatcctttgaccgttccgatgccccaagaggatgattgattgaccgcagattgataaggcgttttgactttcgattgtaaaaacgcatcggttcccgtctgcgccgcattttgtcctttagcatatcctgtaacgacttgctttccgtaatcgggtgaagaagaaatcagagcattgaacggcgttccgatattcttctctttccagccgtccatatccaccgcatttttgctgatcccgctgtcaaagcctgctgtaaactgttttccgagtgatgaagccgtcccgccaagtccggaagcatccacagacgcggcggccgatacagacgccgaagatgaaactccgccagctcctgcgggcgcagcggaagactgagccgaagccgcgcccatatcatcgacaacacgcatgccgagcttagacgcagcctgtgaaagcagcatcttcccgcggcctcggttgttgtcaacgggaatgacaaattctttaccggcttcaccgatccaggaaatggtcggttttgtaatgtagccgcctgtagcgtgtttgtccggttttttctttttatctccgccgcctgtgataaagttcattacgcctgagatcatgccgccgccggttttatcccaaatctttttcacccagtcaaatgctgcggaaaaagcatctgatatggctgtacctacctttacgagaggttcctttatgtttttctcaaaccagccgcttaaccctttccatatatcctttaccgtatctaaagcagtctggaaagcgtctgatattcctttgccgacatttttcaccatgtccttcaccgggttccagacagtatctatgaaccagccggaaaccgtactgaaaacagacttaattttatcccaggctcccgtgatatttccccagatagaagaggccacgccgactacagccgattttacaggctcccagacggtgctcataaaccaggatgaaactgtgctgaagacaccttgaatcgttgtccacgcattcacgatatttgaccagatgcttgtcgccacgccgactacagccgtcgaaaccggagtccatacattttccataaaccaggatgaaactatgctgaagacaccttgaatcgtcgtccacgcattcacgatatttgaccagatgcttgtcgccgctccgactacagccgttgataccggagtccatacattttccataaaccaggatgaaacgcttccccaagtatcttgtatcgttgtccaagcactttgtgctgctttggatatatcattccacgtgtctttcaaagcccctgaatcaaaggcctctcctaagctggaaccgcctaaacttccggcgatgccgcctaccgcgccgccaatcaatgtccccactccgggaacaacactgccgattgccgctccggccgcggccccggcaagaccgcctccggctgagccgaccttctctcctgcattatctttattaatgccgactaaatcagtaagtgataacaattcacctatgccgggaattcctttagctgcaccttttaaccctttcataccgcctttaagcgccttagaacctcctaagtctttcaaaagggcgccgattcctttacctgccccttttgctttcggcgtgtttacagatgcgtgtttgctttcatttacggatgagcctttttttgaagatttattccgctcttcgactttactgcttttgcccctcgtcactccagtacaacagcagcatcccccaaaagccccgccggtttttttggctgactttcctgaagatctaggtgctgttgccgtgcgctgggaaccctttgtcagatcaggacgcttcgggccgttggagccgccggcagaaatgcttcccttactcttttcttttttcgtgccgcctcctaataatccgccgatattgagttttcctaatttttcagcaatacctgatattattttttcgatcaattcgccggctttttcgatgattttatccgggctgaatttttcaaatttctttgcaattttcccgactattttatcaacaaatgcctcagctttttcgatgatcgcatcaggactgaacttgccgaactttttatcaatgcctccaaacagtgaggatgtaaactgatctactttttccagaatcttatccggattgagaaaatcgaatttctcagaaattcggtcgatcgtgtcatttacaaattgttcggcgcggtcgattagcttatcaggactgaatttaccgacaacgtcgtcgactttcttcataaacgaatcagtaaaatgatcaagctctttcaatatcgcttcaggactgaatttgctgacaaggtcatctacctttttcataaacgaatcagtgaatttgtccagttctttcaatattgtttcgggactgaatttactcacgatcccgtctatctttttcataaatgaatcagcgaatttatccagctctttcaatatcgcttcgggactgaatttactaacaatcccgtctatctttttcataaatgaatcagcgaatttgtccaactctgttaatatcgtttccggactgaacttgcttgcgatttcatccactttccccatgaatgaggttgtgaacttgtccagttcgcctaatatcgcttcgggactgaatttacttgcgatttcatctacttttcccatgaatgaggttgtgaacttgtccagttcggttaatatcgtttctgggctgaatttgcttgcgatttcgtccactttccccatgaatgaggttgtgaacttatccagttctgctaatatcgtttccgggctgaatttgcttgcgatttcgtccactttccccatgaatgaggttgtgaacttatccagttctgctaatatcgtttccgggctgaatttgctcgcgatctcatccactttccccatgaaagaggtcgtgaatttatccagttctgttaatatcgtttctgggctgaatttgcttgcgatctcgtccactttccccatgaatgaggttgtgaacttatcgagttctgttaatatcgtttccgggctgaatttgcttgcgatctcgtccactttccccatgaatgaggttgtaaacttatccagttctgctaatatcgtttccgggctgaatttgctcgcgatttcatccactttccccatgaatgaggtcgtgaatttatccagctctgttaatatcgtttccgggctgaatttgcttgcgatctcgtccactttccccatgaatgaggtcgtgaatttatccagctctgttaaaattgtttccggactgaatttgcttgcgatttcgtccgcttttttcataaagtttgcggcgaatttgtccaattccgctataatcgtttccggatagaacttggatgcgatgtcattgacttttttcatgaaggtgtctgcaatggaatcaagcattgaaaaatcgtttttcggcgaagcaggagcagcagatgcaggtgcttttccgaagtccggcatattcttttgcaatgcagccagctgtgctgccaccttttcatttaacgataattgaatgacattgttttttcccgtcagtgaatcaatgcccgctgagattcggccgactgttttcatgacgtgatctatgacgcgtatagtgacagagtacccgttctttaacgcagactgcatatagcgtttgatacgttccatggcaggtgttacttcgtctgacgcatacagtgaaacggaaaatcctttgaaaccggcggccagattccgcaatctctcaaatgccgctgtcgcgctatcttttgcttctattttaatggttaaagacgcaggcagacccgctgatcggacttgcacttttttaatgacggcactggctccgtcttcagctgaaatagagatcatttgtgcgcccagctttcttttcatagagcgctgaatgcggtcaattgttcttaaaacagatttactctctttgcgtatatcaatttcactttggcgttttgtcattttcctgtatttctcaagcgctctgaagccattttggattttccttattttcttcgacacccggtcttccaattcaaaacgggcggtcagctttgccatgatgtcgctccccctttcttcgcttgtttttcaagaatgtccagcttgtaaccgattaaaccgtacagcagcgccttaaaatgtctcggtgcttcatataactctttcagttctgatggagaataatgaagctcgtgcatcgcgtaataaagatacacggcttccttattcccatcttttatcagttttttgcttcttgctccaggtcttctaattcatcttcaaatccgttgatctcaatcgctttattcagccaatttgcatattcaccgccgactgaaagaacgcgttttgccacctcgaccggatctgccgttttgtaggcatcgcggagctccttagaccggaaatcagggtaaattgtagattcaactgcgatccgtgcatagaagcgctggctgtctaagtctttgacccggcctctgcctttcacatttttataggtcgtgctttccttctccagttcatcaatgcgctccgtcgtaattgctttaaaaataaaaggcacgatgtttccttttttatcgacaaaacgctttgaaagcggaacccgaatctcctcagcctcgactgtttttcccggcataaagaatgacagatcatatacttgttcgtttttttcgctcatgatgaaaactcccttactctttttttattaaaaacaggcctgtaaaaggcctgtgtcactcataacgatcttgattaaaacgtttcagaaagcttttccggcacatcgaaatcttcaaaggtaaacggcacttcttcttcgagcgcctctgagtctacgtccagtccggcgattttagcggaatcaaagttgacgtcatacagggtgacgcgttctgttccgcggcctgatgatttgtcgtcaagaacggcttgaagcgtaaaatacgggtcgctgccttttttgacgtaatccatcataagcacggcaaatttggatgtgactttatagaacgttgccgtgcccgttccgttggcgcctgtcgttttatgtcccgtcatgcggcggcccatgatgtttacttccgatttgtttttttccacgtttgcttcaaaggttttaatatgcgccatctcttccccatcgagaaataaacggccttcttttcctgaaatggtgttttgcgcttttaatgccatcttagtttacctccacgttaaagtagaatttttccgctgcatccacaggctgtacggcgagatcaattaaaaaaccgtcgcggtcttcattcaggccgattgtgatatcagtatctgaatcaaagtttgcaatgccgcccgcatcctgaagtgttgtcaaatattgaatgatcatcgttttgacgaattgaaggccatcgtttgtcgcaggcagatcgctgcccgtgccttttttcgatttaattaaggctttcagttcacgtgtcaaatcgttattcaccgcatcaagcacgcggacgattttgtttttcgcgaactttttgtttttctctgccgtaaatgtcaccaatgagttgatatctttttcaacgctgactgatttatcacgggcgtcataggagaaaaggaattcacctttggcaagacgttcgatcacttcatcatgagtcaggcgatgcagcacgtcgactgcgccttcgtattcaacaaatgtgagggactgattaaatgcagcggcggcactagcacctgccacccaagcggtcgcttcttcagctttaatctcggttccgtcttccagcaggacgccctcagtaacattgataatgccttcataatccccgctgtaatgggcggtcaccccttgcactttttgtccctgcgcatcgcgaaggcgtttaatgaatgcggcaaatgtcgctttcagctgctcgttatccgcgacaggaagagcgatcacatcgaaattctccgtttcagccgcagctaaaaaatcaatatagtctgagttggctggcgctttatcggttccgcctgcaagtcggatgcccgcctgcgggtttaatgttaccccggactcttcctcagtgcctgtcagcgggatggaaaccgacagctcgcctgttcccgtgaatgtgacatagccgtttgcttttaattcttcggcttttttcaccgtttgtttgtcaacttccgcttcatccatgtatgtggtcacatcgaaagcggtctgatcaaggacgttttcactgatgcggatgatgatgtcatttccttttgaaccgccgtacagagcggttgcttttacaccttgcgaaagatcggcgctcgctctgagtccctctgtcagacggtacatcaaaacggtttttgctttcttcttcgcctcgcgcagcagaatcagtgacgggtcttcaatactgagccccacttttttattcaaatcttcaatgcttgaaatggagacgaatgttttcgcttcaccccagttggatgcgacgggaagggcgacaatcccccgctcaccgatcgatacccgctcctgagcggttgttttaaagttaaaatagatcccggcacgttctttttcttttccttgcgtaaatgttccgccgttcattattgcatgacctccttggttaaaaatgcttgaatgtatgtctgggcttgcgcttttgtcatttgtttctgcttcacgccgaataaagcaccctggagaatttcaggttttacgccgaaaagctcctttgcgtgctttgttaaatccgccgtgtcataaagaaccgctctttctgccgtggcggcgttcttctttttatgttgtttcacttttgtttcaccccgctgttaatgtccacaccccgaagtgcgggaaatgtttgtttcttataatagtagcggctcgtccagcggattgtaatcactgcctcgcctttgtctccgactctcgtttcgatacggctgatgcggatgaaatcaccggtatcctcccctgattcagtaagcagcggaatcatctgtctagattctctcaccgcatcagcaatccggtctgcttcatcgagcgcctgcaccgagtcggcatggaacagcttcacattcagactgtatgttttcttaaaggtagtgactgtgtcattctcgtcaaaaacaaaagggggcgggatgtaaagtgacggcacctgaaattgttcaggcagttcattttcatatacgggcacgccgcactgatgatataaaaatgcggcgattgaaccggtttcgcgattcatccgatatctccccccaacgtgttaagccacttgctgaagcgcttgtccagcgaccttgcgaagattgtttcatataaaagaagggctttgtcccaaaacccattcccgctgatccactgttttttgagcgccattccggttgaagctgacggatcatatatgaaccgggagccttgaaaataccccggcacccatctgacattttcttctgagacggtccaatgtccgtcatttatgaatgaggcatactctacattggtgccgatttcaagagtcagtcccccgttttcaatgatccacacatgatcccgcgctccttttcggaaagaagacagcaggttttctgtatcgatccctcccgaatgaataagctcctcccgtaccagatcgagaaaatcctctcctgattgttccagccatccgctggcctgacgggtaaactcgccggatgatgccttcagcagcgaccgattccatttttcaaggctttttatgctcatagtctgtcatctctcacagcgatggcctcccaatggtgctgtcttgctttcttcggcatttccagaatatacgcctgatcttcccaaacgattttgtcattgacgcgcaaaactgtctctttcggaaaatgaacgagataccgctgatataccttatgatcaggctcaagctgaataagctgctgctgtttttcaacaaacaggcacggcactctttcagcatcgggaacttccggataagaaaagtcaggccggagcttttcagcgggaatgccgaaacgtccggccttcggagctgacaccctctcatgataaatatcgcatctgtcagtaagcagccgttcgtagctcataacggcctcacctttgcgcttgcagaagccggggtacagcccggcgcgatatattcacaaagcaggtggtacaccgccggttttcggattccgccttcaccggccaccgtataggagtagtcgcctatcttttcagattgataggctgaagcggctgcttcgttctggttgatcagcgcaaaatattgagaaagctttaataacgcaagcttaatcttttcgggaagcggtgagtatacaggatcagtgaacggatgccccgccagcctggccgcttccgcctccgcctccagaatgtcttggataagaagctgctccggcctgtttttgacttgatcataaactgaatatgaaacaacgtcagacggctgaattaacataactgccacccccgtcttattctttaacgtttacgattttggcgcttgcatcttcttcttcaaatttgctgtcaagcttagccgtcagtacgataataaatttgcggctgcgaatatctttatctacttcgattctgatattccgtgaaaaaccgagaatgatatttttcgggtgagtcaaaataatgtctgatgcctcgtactgagaatcaccttctccgactgagtacggctgcaggttggaaacccctttaaccggaacgccgaatgctgaagacaaaccgccctgcaccgcaagatcccccagattggtctgacggtcagccacacggtccttccattcaatctccatgccttgagatgtgtaaaatctgaattcttgaggcagacgcaaatattttgccggaattgcttttaagccttttttaaatgtggctctggacagctcttccccgtttccgtcaatgacgtgagagacggtctgcttacggattccgtcaagctgcgccaaatacggatcagatgaagatgtatcgccgtttacgacaagctcttcaatatcgactgccgcccgctccgctaaaatctgcatgatcgtctgctgcagaccgtctttttcaatgttgttttcaagcgtgtcataggtaatgttaatttccgcaatgacttctttcgtattcagctgcaccgtgcttgttgccgggacggtcagctgatcgtccgttaaggcttttccttcctcagcggcacgcagaatacgctggccgaaaccgattttttcaaatttctgcgagtcgttttccatttgaatcactcgcgattcgctgaaaatagtcggcgtgttctgcaccatgcggataaatgctgaagcttgtgcgggattcattaaaccgccgctttttaaagcggaaagtgacatttccgcctttctgatgatatcttgatttctcactctacagttcctccttctgactgggcttaaagcagtccgctccaaatggattttttaacaggctcttggccgctcgtctcttcttccggctgctttgatgcgcctcttactttttcaagcgcttcgatgcgtttaataatcggcgcgagcatgtcctcgacaagcgttttcagcttttcttcatcggacggcgcagccgccccgtctttgtcatccgtattttggtccaaactgtcaagccgctttaagagcgggtgcagcgcgtgttcaatcgattctcttacgtcttcttttctcatcttgttcaagtcctctcccttgcggtatcttgatttgcggtcacggtcgagaaattgcttgaccgcgccgaataagcctgcttgcttttcctccggctcttcgtaaacgtcagcggttcccgccatgctgtagccagtaatgacaccggctttaatctgatcccatacttcatcggaggctttggtgacaagcacccaagagcctttccggatcacagcattcccgatttcaaagtcatccggggcgacgtacgactccaccacctcgccggttccgccttcaaaattatgatttgtatcaatgttgcgggcgtccgccaaaaaaccgtgagcggccttttcaatctcttcggccgtcatataatcgccatgggcatccgggacatccggctcgtatacaatgccgtaaacaagcttctgctcatccggttcgctttttgtaaacacctgcacctttttttcaaatgacggaatgccggccgcttttgtgaaaaagaattccgtttggttcgccgccttatcgacatagcttacaaaactgatgacggcatttcttaattctctcggcacgagatgttttcaccccctttcaggattgctcctttttccgttgcagcaccggccggctgtagtactcttcaggccattcttcaagcgttttgccgagcactcttccggccagatcacggagatcattaggagagacggcgccggcggagataaatggcgtaagcaccttcgcaatttcaagcggatcgcgaaaatcaggcccttttagtgcgagctgtacatcgtgaagccccagttcaggcaaaaataacgtattgagcttattaatcagcgttttccgctccggctggaacacctgctcctccgttattttccgtgccgtatcggctgtagctttgttgtattcctgcgcctcgcccgtataaagcggcgggagacgaaaagcggagcggagtttatttctgcttttgtcgtcatattcaagaaacagcgcatcatcctgcagaatttccgcaagtgatttaatttccacagacacaggcgtaatgtcttcgcctccgtgaaggtccttttccttcgcaatgccttccgcctcaatcagcagaaatttgtgggcgttttccaccccttccaggtcattcatataatcctggagctctttgtacgaggtttctgacagcatgccgttttcaaccgtaatggcggccggcacgtgacggccctgcttgaaatacataaaattcagttcttccgctttccgggcgccgtacagattgacgatattgccgacccagcgcgggataccgtaagtgccgctgccgatttttaagtgaatggcttcatttgcccggtattcttcaggcaaggtctttacgtattcgccggttctcatgtccatcatccgggggtcgccgtattccttgaaaaatactttatgcccgttcagcatctgaacatatttacggaaccgtttttgccttttaatcgttttggatgagccgttttcttcatatgaaaacgtgacttcaacgggatcagtcacaccgcacacccgcatatgtttcacatccagatattcaatcccagccggttttcccgctccgtcacgaagcacctcgagaaaaccgttgcccgttttttcgcggtcttctatcgcataaccgaggatcgtctcagccgattcatcaaaatgaaggcatttgtaaaagctctccagcttcatccagttcttttcagcccgcgcttttttatccggggagcagtctgagctatttacgtcaaaggtatattcgacatcgaaaccgaagcccgtaatattgacccgatacgcgtcaatgcactgctgaagaatggtcgaatattcggcgatcgttttcagctcaatgagattatagggcggagagatgatgtcttcgccgtacaaatcggcaaattgatcttcttgcatctgtcttgcctgcggcgcggccatctttgatttaatgacggtggctctgacgttttggtttttcgccaacggttacctccccctttcccgattcggacgtgtccgtttttgtgatgaatctttcagatccgccgcgtcataatcatccagcgcgtaccaaatcgctgaaagtgtgtggggatcaattgaaaactcatcttccgacagaacgccgtttttgtttttcgcgtatgttaagttttgcaattcgcggattgtattttgacagctgtctgagcaatagatgtgtttgaaccgtttcagttttttcgtatactgaagccttgagccgggaaactttttggccgcgaccatgcaaaagccctgcctgcggaaatattggatgcttttcggctcggctgaatccgccttgatcagctcttttttatccgccaattcctgaagctcctcagctgtctgatcatcggtcattttgtttttgtaatactcccagaaaatataaagctcttttttatccggatcgacggcaagccggatgaccgcattatatgactcttcaaaaccgaaatccatgcccgtccgaaacagcgggcgtctgatagcggcaatccgctctgttacttcggtgtgctccatgacctgaaactgcggaaatacgcggatgccgttgacgccgaactgtcctttgcgggcgatccggtacaaatcgggatcgtattgccgtaagctgtcaagctgcttaatatagctttttagcaaaaacagattgtcgcacgcggtggaatggtggtaatacgtatcccccttaacgacggtgcctttttcatacagcgtatgatcatccaatacgaaccgttttttttgctcatcacgaaaaaaatgccggtacgtccaattggaggtgccgacgggatttgtggtgcatatcatgtgaagcgaaagctcgggatggcgcagacggccgatcagctccttaaagccttcatacttcacttctgagcattcctcaatccaaatcaaagaaatatggtgaatggatttcaatttggccgggttgtccattcctttaaacataatccggcttccgtttgcgaatctcagctgcatcggtgaagaaacggcctttacagcatgtcccagctcaagctcctcgataatgtcctcaaacagtgcaaaggtagaatccctgtgcgtatcgaatacttcccgaacgacaagcgccgtccgtttttcacaaagcagcttcaggatgattttcagcgcggtatgatagctttttgacgagccgtagcctccgacgagaaattggtacgtttcattccaattgaacaaataatcttcaaagcgcgggttgaccgctttttcaatcatggccgttcctctttccgcgtaatgactatgtcaatcggcttttggctctcttctgttttttccagcttctgctgcgccagctttaatttttctcgttcaatttttttcttaaattgatcagggaaaaggtcaaagtacaaggacagcttttccagtgctttcatcttatcggcaagctttattgcaatgccttctttcccgagtttcgcttcggtgacgatggttccgtccagaagattcgaatctttaacatcaacgtagctgatctcctgcataatcggattatcattttcgtcaaagagcggtcctgattttccgaaggcctgaacctccctttttccgaaggttacataatcggtaatgtcggcgaaagcgattttcacatagacttgcagaacgtccattgcttcgacaaacactttattgaccatttcctttttcatgcggctgatttcttttgcgactttttcattttttaacagcctgcttcccgtcacatgcgcgctttccggtgaatacccggcttttatcgcggattgggtggcgttaaagcttttcacataataaagacaaaacagccgctgtcgttcgtttaattcatcttcggccggggcgttttttccgccgctttttacattttgattgagcgcttcgtcccagcgcccttcttttttccatctgccgatcgttcttgcggatacgcctgattttccggcaagggcgcggtttgtgatgcggccctgatgagactgatagattgtaaatgcctgttctttttttgcgtttttcatgctacggcatcaccgccacctccgacatggatgtctataataaaaagcggcttctttcgggccgctttttgggatcgtctgttcacttctaggtggcaaacgtatgacaacttattaagcaggcgattgatttctttgttcctgctgtttttgaatttttagaagcgcccgtttgaccgtcgtctgtacggttgatttctttacgttcagcaatgcggcgatccgttcatacgaaaagcattccgctttgtggaggagaagcatttctttttctctatccgttaagacggctaatgcgtcccgcagtctgattctgtcttcttcagtcacatttccggaaggtacgaacatcagcgcctgtgaataggtttctatgattctcggatctttaatcagcattctctgataagcgtctctgcggtctatcgctcttcttatgccgggctgccggcctttttcaagccattcagtgacatattccaaatctgtaatgatcgttctgatgatttttttatctttcagttcttctgaagtcagcgccgtttcatcagcttcctcaagatgcttgtaccattttttcgtctgtttcagcgtgcgtttatattcaaatagtaagtcttccataataaatcctcctctttttcggaacaaaaaaagacaccaaccaatgcgcaaaatgtgcgcgattgatcagtgtccgcaggctttccgtcttggacgtattcttttttaaaaatcaattcaatttaaagccgatttcgtattcaacccgggcgagatccccttttctcgtttcgataagcgttttgccgtgctccggcgcttcggcgagccatacttccttcttcagcccgtctacaatgatgacccgcacctttccttcttccagctggctttttaatgttgtatgttcaatgtctgacagttttttaggattcatgttttatgtcctccgtctttttcaggatgtttacttcatgtatgaggcttccgagttcattaatgaacgcttctttatcttcagcgctttctccccgaagcaggcggagagccgtttcggccgcttcaaaaagttccggggctttagccatcaatgccgcgttgacttgctgcgagtatgaacttaagttgaaaacggctgcgatgagccttccgtttgaataaggaaatttctctttatccgattcgctgtatgctgaataaatgtaaatgggtttttcttcgccgctgtgtacggcccgccacggggcggggctgttttttacttgcaatgtttatcctcactttccatcagcctcatgccatgcttcaatttgcttttctatccgtttcgccctgaacagcaggcaaaaaagccatttgatatatttatacacgtgcatcaagcctcgcttttgcgtcttgaaccattcgctcaagacgtttaatgaccggcgttaaatcggtccctgttttgcagttcgggcaagggtgaaagacagcgccgaaacctgtttccgtcacaataaccttcttcggcccgcacagtttacacattatctcgccccctctaatctgtggttgacttcatatgggtttccatgaatgatgactaaataatcgctgcacatctcatataatcttgtgcccaaggcttcatcaacctgaaccagttcgtcacaggccagctcgctcgacagaagaaccggcttatgatttaaatagcggtaattcacgacggcgtacatttgttcaatctgccagtcggtcgcccggggttttccgttcagcggtttaaacaaatcgtcaataaagagcacatccgcctccttcatacgggcaagctttgcgtcgagcagatcaaaatcattttttaaatccgtaaagccctccacaaaaggaaaatacagcaccggtgtctgcttctgcctcatgacataattgctgagagcggtcaaaagatgggtttttcccgatcccggacgccctaaaagggcaatgctgtttttccggcagtttttaatcgtgtcgaagttttcaacaaattcaagggcgcactcatatgcgtcgatgactgcctgaggcttgccccgcgtaataaatcctttgaaatccagcttccgaaaggcgcctgtaatctcacttgcgccgaggatacgctctacttttcgttcagctgcgcagcggcacttgacccacacatccattcccagctgttttttgagataaccgccctgatctttacaaagcggacagtcaaagcggctttcgtctgattcttccggtctggccgccagtaatggacgttttccgtttttcaggtcggcaagaatctgctcgatcgttcgtgttgtcatgtatcgtattcctctctttttttgttgtgattgtccttcccgcaattcgtgcattcaagcggtcttcgataaacttggcgcaatagctgaaggccttgatcgtttcagctgatgaagtgcgccgctgttcaaaagcggcaaagcattcgccaagccatttgattgcttcttgtactgatgcacctagcgaaacaatacgggcgatggcctggtaatctcttggcgatgggtatacgctccgcccctcctgtgcagaccttaacctgataaaatgggcggcaatttcgttaatcgcttcttcagcagtatgattttttgttatatctatttctctctggacatttttgtcccggtgatctgccgttattgtccggtcagtgacttccgggcgggtcaatgtccctttcggcgtgaatcttttcgagtgttttacggagatgataagtccgtaaggtgcgcggacggttttgatatattcgtgctgttccaagatctcaagccaccgtctgacggttttttcgctgactgtaaatacatcggccatttctcttgctttaacgggcttatgcccgagaacgagcccccacttgatgccgtcttttatttgttcctttgtcgttgagctgacgaaccataaaaacagccatatggcggaacccattttgtcataatgttctgaattcaataatccggaataggtgaaaaacgggtagcttttacgattcatcatgaacatctccgtttttcttcaaccttatataacgttcatactgcaatcggttatcaaatcggaacaccggaagtccgcaagcggtaaaagaaatcgaaccgcctgcttttcctaaacatttctggtcagccggattgctgctgaaacagatgattatcggctgcatctctcaccctcctgatcaatttcttatcgttatttgatacattttgtatctctatgatgttgattatatacgatacatttcgtatcatcaagacctttttgatactttttttatcatccctttattttgatacattttgtatctataatcataagtaacttagggtgttgaaaaaagagaggtcattcggatgataggcggaagattaaaaagtctcagaggaaagaaaacgcaggaagaagtcgctaatcatatcggtgtctcgcgcgccagatattctcattatgaaaacggccgatctgaacccgattatgaaacgctgcaaaagcttgcggattatttcaatgtgtcaacggattatttgttaaccggaaaagaaccttcagatgaagatctgtttgctgatcccgacctgcagatcgcgtatcgggacatgcaggacttttcgccggaaagcaaacagcaggccattgaattcattaattatttaaaagaaaaagagaaaaaccgcaggccaaaacataaataatccgctcttttcctttaaatcgattaaagttcagccgatataaaagctgaatgtttatttttaaaagaaaagggaattgattcaaagtccgatcagggcttttctttctcacttaaaaagaacatatgttcgaaagggtgttttcaattgggcgattttttaacacatctggaggaatacgtcaaaaacttatattgccgcatgggaatgaccgcccctctccatattgatatgcaaacaattgccaaggagcttgatatttggattcattttgaagatacgcacagcatgatgctgaagcgggacggcatgtacagcatcgtcctgaatcaaaaaaagtcacctgaggagcaatgggaggattttgcacacgaactgtgccatgtgctgaagcataccggtaatcattttcacatgaacaagctgttcagggaactgcaggaattccaagccaaccattttatgtaccacttctgtgtaccgacctttatgctgttaaacatggagcttccccagcggagaagccatgccgtcattttaatcgcagccgctttccgggtgacggcatcatttgcggaaaaaaggcttgagctgtttgaacggcgtaaagcaggtattcaatttcagaagcggctcgcttgtcttctatccgacaagcgtccaaatgtgtattacgaaggcaggcaaaaacacttgcatgccgctgaagaaaaagcgccgtattttattgaaagctgacatcagaagaaaggtattgtgaagcctgtatcagacgctgttcccaccgtactgcccgccaagcgcttcctgcgtgatatttaagctctttcacacagccccggtgcagaaagaatgggcaggcggtgcgaatccggttcatttactcataaaaaccgagctttacggcttctacataccgaaaaaacagatcggtcggcgtgtacgtttctctccggcagccgaaattgctgaacagcgcgcttctctgtgccgtgcttacttccaattgcagccccattttcctttttgtccgattgacaatattcccgggattcacacctgccagccgatcgttcatatccgttagttcggcgcaaaaccccgcttcacgcagcagatcacaaatacgtctggctttttccagatccgcgcccccgacgagtgtatttgccgttttcagatcatgatacccatgaaaagccagtgcataatggtgagcagttactttttctacagccagcggttcgtcaaaacgtgtgcttgtcaagtggagaaaacggttgttgcactgcttcgtgccttcaaataagtaaattgaactttggtcagaaaatgcccgcaccagctcactgacaccgggttcaattctgccgccgtggggagcgaggacgatacattcacttccctttttttcttcataaataatccggtattccgattcagcagcagaaagagctgcgaagctgtcatatcgatctttcatgtttaacatgctctcctttaccagtcagcaccagtttactctactcatctaggaatgaaaacctttttatagtatgatttgatagaatacgtatcaggggggatatatcatggggttcatcaatggattgcttggtaacgcgtcgacaatatcaacggctgaagcaagagaagaactggcccgtattttgctggaaggtgaaaatgtcaatgccgcgtttaagctcgtccgcgatatcattgtgtttacggataagcgtcttattcttgttgataaacagggacttacgggtaagaaaacggaggttcaatccattccgtacaaaagcatttccagattcagtgtagaaaccgccggccgctttgacttggattcagagctgaaaatttggatttccggcgcggaggttcccgctgtctcaaagcaatttaaaaaagatgaaagcatttatgatattcaaaaggcccttgccgcagtttgtatgtaagaagaaacggaagcccggggtgcttccgttttattgattacagtttttcttcgattttcgccttcgttttcgggccgtaaattccgtctgccgttaatccgctgacagattgaaaacgttttacggcatttgccgttttcgggccgtaaacaccgtccgccccgtgattttttgctcctttatcaggataaaaataaagggcggataaagcggtctgcacttgtttcacgtttgtccctttcgtcagcggtttcgtcactttgatcaccccggatgggagcggataggatgacgcagcctgactttttgaagaagaacccgtctgagggagcttgatcacctgtccgactgtaatgcggttcggatcagtgatatgattcatgctttgcagcgattttatactgacaccgtgcgatgcggcgatttccgataaggtgtcgcctttttttacatggtattcagacacggaagaagaaacggacgcctttttcagcggcatacttccgtttaattgcttctcaatatccgccttcacttcatcccagcgtccttcagacaaaatgcggtgcgggcagtactttccgttccagtcctggtgctttctgattctgtcaatcccccagccccgctccttcaaaagctgcgccgcaaattcaatcgccaatttctctgcggctctgtaccgttcgccgcctgacttactgtaacagatttcaatagcaatcgacttccggtttccggtaccgttcgtgccgtcccccgaatgccaggcattccggtccaacggaattccctggatcacttctttgtcatcaactgcaaaatgatagctcgttgattcgctgttccccgtcatatagctgatctcattagcggcggatgcgtcatttgccgtgttatggatggtaatatactccggcgtcatcgggttcggacattttaacgcatatttatcagccgatacgagccgctttttcacttcaatccccactcttcatctctccttatgcctttttcataaataggtggcattcgtaggacagatatcttgagtacatagacccttcaatcggataaaaatggaatggttacgcacagcaaaaaacaagacccttccaaagaagggtctttatgttatgtttggtttcgcgcggcaatatggaatgtgccgtccgcttggttttccaaatggctttcatggccgatcacctgtgtaaagctgaacccgacagcaacaagcagcaatcctgacaacagtttagatttcatatagacaatctcctctctggatttgtttttgggcgtgcaccattttttcataaaacgtaagtgctttttcaggctgtccgtgtttcatgtaaaatttggcagcatcatgcgccaattcttccacatacggatacagcatgtgttcctccagaaaatcaaacgtgtgcctgacggatgcgttatccattttcttgccgtataacgcatgtaaaaattgaaagagatttacaaacaattcatcattgtattcgcgggcgatactcagcccgaggcggtattgcttctctgcttcggcggtggtgttctgtttataaagaacctgtgttaatgagtaaatagaatgcggaagattatcgaacttttctgacttgcaaatggaaacggatgtctcaaaatattcagctgctttagagaggtctcccattttttcgtaacagtttccgagattatataaggctgaactgataagacgtggattgccttcttgttttgcaagatctaaagcaagttctaagtggggcaatgctctttctggatactgcatgtcatcataattccctgcaataacgaattcacattggattctgcggacgttgtacgtctcatacgattggtacgtttcaagggcttgtaccgcatagctcatggagacgtaggtttgtttcaagttgtaaaaaatctcggccattttaaaagcaaactcagctttctcgatgtcatcagaaacgagtgcgaggtttttttcagcccgtttgtaatacatcatggcgtttaggaacattttctgtttaaattcatacattcctcgaaaaaaattaaaatagtaatcaagcagtcctgtcagtttatactggttgccttcaatgtcttccaataattctgaaaactcaggctgagaagggtcctcctttaagggcttaatgtaatccagcatgacacggtgtctgaattccattaatgaataatacaagagcagatcctgatcttcttccatatcctcgatctctctctctacttcacgtttgacgcgctccgcctcaaggacgtgaaactgccggatatgggtgtaccattcattaattttgagcccgacaaaagaggacggaatagtctgcttcatcctcaataaatccccccttttggaatgaccgagatatgtcatattttatcataattgctagaaaaagaagaacgcaaaaagaccgcaattgtcgaatttcggatatccgcaacgaaatatcaccatcaagagcttattgcttgtttcttccgcgccgttgatatagcatatctttgcatctttatattcttgataaatgggggttttcacatgacagcacaaaatcaattggtcagccactttctgtcacatcgaaacgtgacgattgagctggcgcaaaaaatcggccgcgagcattacgattacaaaccggcagagacttcaatgtccgctcaggaacttgtaaaacacatggtttattcttttctcatgtttgcaaacgtcattaacgacggaaacggatcagccatccagaacaaaccgaatgaagaatcagaaacagacctcgtcaaactggctgaaacgtgtactgaaaaaacggcaatcatcctgtcacagctgactgaagagcagctgaaccgcgaaattgacctgaccgcctctttcggcagaaaaattaccggcgccgctctccttcagcttgccatggaacatgaaattcatcataagggcaatcttttcgtttatgtaagagaaatgggccacacggaacttccgttttatcagcaaaaatcataaaccgatgatccgccggtctgcgatataaagcagactggcggattttttgttccatataaaattttccgaaaattcgattgattactgccccttaatcatatataatctgataaaaatagtaggattattcaggaggcacacagatgactgtaagcattgtgttcatgggtttcatcgtcgggacgctggtcggattgacgggtgtgggaggagcggcgcttttgactcctttgctgatcgttttaggaatcaacccgtctatcgccgtcggcactgaccttttatataattccatcacgaaactgttcggtgtcgtttctcattggaagcagcgtaccgttcattttaaacttgtcggctacttggcgctcggaagcattcccagcgcatcagccgccatcggcgttcttcacttgttccccgcttttcaccagcatcaggagcagattatcaaacatgcgctaggctacgtgctgacacttgtcgccatttccattatcgcccgtctttttttcgataaaaaactgcggccgaaccgctggcagcaaaaaacgcttgaagaaaagcggggactcatgatactgatcggcgtcattttcggcttcatcgtcggcctgacatcaattgggtccggctcattatttgcgatcgccatgctgtacctattcagaatgaaaacggcagaagtggtgggaacagatatcgcacatgcctttttacttgtaacggctgccggtctcttaaacgcaagcttcggcagcgtcgattacctgctcgtattgaatctgttgatcggctctgtgccgggtgtcctcctcggcagtttcttttcgccgaaattctcaccgcgcccgctgcagtttgtgatggcggcgattattttgatcagcggaataaaattaatataaaaaaagcgtcctttacaggatcgctttttttatttaggataaatccccctaatccaaagccaatgaggtgggcatctctttatcaactaatctcagggagttcaaactaattgtccggtatttcctaattcacatccgcgtcagatttccaatatcgaagttaaatattactttacacttattaaaatataaacagcaaacgcaataatgtatatcaaaaatgatccagtcataaattttacaggttttcttgagaagtttaatactccttttaatccgttattcaaaatcattccgaaaaatataaccagcgtaactcctaaagcgagcattgaaactacgaaaataacctgctccatgtcatatcatcctccatttacattctgttattttcaaatatacgtacaaacatgagaacaaccgaaatcgttagaaggctcatagtagaaaaaaatgccgctgctaatcttaataagctgcagcggaaggaaatatccctaaaagcactttaagcaatgtgcttttcctgccccattaggacctaataaaccgtatattttccctttttccagtgttaaatttatatcatgtaaaatttctttcttttttatagaaacattgatattcttggatattaaagctggatcagcctttcccgcttctcatcatccctttccgtcttgttctgtttataatataaacttacgaggttaaaaagaagatataatcaaggttaatttaagtttaaatttctcaacataaaaatacgtgaaaccgctatggcttcacgtttcttcactgctgttttggttaataataaaaaccgttccattttgattgctctttattttatgttcaagcctcatctggctgagcatcatattaatgatagataatccaattccagcgccttttctttcggatttataattcattcccgggcccatatcctcaattatgataacgggtttgttttcaattaactttgtctgtactgagacgtattttcctgaatttgcatggcgcaaaacattctgaaaaatgttatcaagaattcttttcagccaagtctcgtctatttcccacacaatgttttcttgcaggtcaatatctattgtaaagtgctctttctcaaaaatcggataccaagctgttaacgaggaacgtataatctttaagatgtcacagctctttttatgaagaggcaatttacctgcggcaagaagagaaaatgatgacaaattgtcaatcagttcgcccataaaagttattttatcatttataatgcctagtgaacgctttcccttttcgctgtttatttcattctttaacgtaaatgtatgtcctctgataaccgtaagaggtgtccttaagtcatgagataaatcagcaattaagttttttcggatttctccttcttcacgctcttttagtctgctgttcctcagttcttcaaccatctgattgaatgaatattccacttgtcccaattcatcattctgtttaactgttacaaattccggtatgccgtcattatcttgttttttcatatgattccccagagaaattaaccttttttgtatttttgcaaaaaacatccacgaattgaacacaaacagtgaacagacaaaaatcaaagcgataaaccatatataggaatacttagccctcataacttcccattgagatcctataattgatcgcggagtttctaaaaatgcatacccgctgtcttcatctccacttaaataagcactcagcaataaatatttcggttggttttgttccatgaatttggtcaattcgcttacatgaatcagctcaccttttttggcgaaccgatctgatgtcgaaaaaatcacctttcccttatcatttatccaaatgatatcagagtgtttatattgcttcatgtgctggaaagcagccgtaatttcccgattagactttcctgataagttttcgacatcggatttccaatcactttcaagtttatttggttcataatgtacttgtccctgatgatcaataatatatgttaacgtaacataatatagaaaattaacgcctaaaaacgctatcggaaaaaacaaaattgaggcaatgatattaataaggtactttgtcgataatttcattgtttaatcctgtatccaattcctctgattgtttcaagaatctccggctcgtttgggtttatctcgattttttgccgtaaatgccgaatatgtaccattaacgttttatccccttcgatataaggctgtccccaaatattttcataaatttgttcctttgttaatatttgattgggatgtctaagcaaaagcaaaaaaatccttaactgcttgtcagttaaaaatatttcctcatgactttgattatttaaaatccttttttctttcaagtaaatacttaagtgttttaacttcaattcatgaatagcagtcttatcaaaccttcttaacaatacttcaactcgtgcggccagttcatcgggatgaaagggcttagtcacataatcatccgaaaattctaagcctttcagtttatcttctaaacctgttcttgctgttaacagcaagatagggatctgcggatgtgtttttttcatcctttggccgattgtaaatccatctaaaccaggcatcataatatcaagtacgataaggtctgccttttctatgtatttttcgtaattataggaagaagtgagccagataatcatataaccccgttcttctaaatcatcctttacaaattgtccaatttcttggtcatcttcaatatataaaatagtattcatttggatctcctctgaaatttcgtgatctgaaaatcaatcttccataataattatatatattataaaaatctcctttaatttaaggcgccattccgttccgtgcacccatgcaatgcaaaaagacgaccctatcacggatcgccttttcccttataacgtcacaccggacttaaaaatcgcaagctcccgaaaatcatttttttcgttattgacgaattctccgcttgcaactttgatgttgtattgaatgaattctcttacaatgtgatcttctgttgtttgttcttccgccaatctgccagcgttataatcaatccaatgaggctttgattgaaataaatcggtgtttgttgatactttcacagtcgggacaactgtgccgaacggcgtgcctcttccggttgtaaacagaacgatgtggcatccggctgcggcgagcgctgaggaagcgattaaatcattgccgggtgcactgagcagtgtcagtccctttgttttcaatgtgtcgccgtatgccagaacatccgaaacaggtgccgttccggccttttgtgtgtagccgagcgacttgtcttcgagcgttgaaatgccgccctccttattcccgggtgacggattttcataaatcggctgctcgtgctttttaaaatattgcttgaaatcattgatcaatcggactgttttatgaaacacttcctcgctcgccgcgcgctgcatgagaattgtctcagccccgaacatctcaggaacttctgttaagaccgtgctcccgccttgtgcaatcaagtaatctgaaaatctccctaataaagggtttgcagtaatgccggaaaatccgtcagagccgccgcatttcaatccgatgttcaattctgacagcggaatttcttcacgtttatctccccttgccgcaaagtgtatgtctttaagaagcgcagtccctgcttcaatttcatctgtgacagcctgtgattcgagaaatttcacccgatcctcgttcacttcagagagcgtttcctttatcgctgccagctcattattttcacagccgagccctaacacaagcacaccgcccgcattcggatggcggatggcatttatcagtatttgtttcgtattctcatgatcatcgcccagctgcgagcatccgtattgatgctgcctttgccgaactgaaggactttttcaggatattgaatgtattcgccgcacatttttttattcagctgccgcaagctgtccgcctccttctgcattttgcacacgttaacattttttcgcgcgaaaacccggttattcagacgggccgttatgtgagttttttgattgaatctctgatcatcacctcggtgttttcatacattttttccgccgctgtattcgggtcggcgataagcgctaaaatcttctctgcgccgagtatgctgattttttcaaccgggcgttttactgtcgaaagcctcggcgtcatgtattgggaaatgccgatgtcatcaaatccgataacggatatgtcttccggaacgttcaggcctttggcgaaaatagcattcatcgcaccgatcgccatatcatcatttgaacagaaaacagccgtgggcggtgattgaagcgctaatagtttttccatcgcctgactgccgctttccatatcatagcggccttttacactgtattcatgcttaatcggaattgaatgatcaattaaagccgtcaaatagccttctttccgctgtgcggttgacctgaatccttccttcccctcaataatcgcgatatctctgtgtccgtttgcaatcagacagtcgaccgcttgtctggaaccttctttatcgtttgataaaatattggtgatgctccggtcgtcaatgtcccggtttagcacaacgagcgggatgtttttctcgcggatatgataaataaaggagttatcgctgtcgctttggctcattaagatgattccgtcgtacctcatgggcgtaatggtttcaaagcttttcagatcgtcaatcgcgcgcacgaacaaattgtattcctcactgattgtgcggtttacacctttgatggtatcggaaaaaaagctgtgtgaggttccgtttgtgatgcttgtaaaaaacagtccgatcgtatgggacttttgcatggcaagactttttgcatttacattcggtgtgtaattcagctgtgaagcgagctctaatattttctgttttgtatgctctttaatgtaggggctgccgttaagtgcccgggatacggttgtgtgggatacgttggcgagttttgcgatatcttttatggttaccattcggttttcctttctttctgtatactgtcatttatttctattgtaccattaacgggcagtccataaaatcactaaagttgaggttttgtatgatgtaagtcctgaatgagctcggcatgctgccgatccctcgcgccaaacccttctccctgcaagagctcattcgttttttcccaaatttccggtgcggttttttcattcaatacgtcataaataccgaaccagcgctgcagctctaaatgcgtccagctgtacagcgggttgcctatcgccatcggcactgttttagcccaggcgaaaaacttctcttcatctgatgcgtttccggtaatgcagcgctcttcgatgccgttggctctcatgatccgccacttatagtgatcaccgtaaagccatgcctccgtaatggttgcgaaggttttattttcatagatttccttcgggctcaagtgacagtgataatcaataatcggcattttttcagcgtattcccgatacagctttacggcagttttactatcaagtaaaaaatcatcgcccataaaagctttcacactctcatcctcccttataaaatgttaacgttaacaattttcgttcttttttattttagcttcctctttctcacatatcaatcatttttattttatttttcaaaatattgtattaactgatacacaaaaaaaagacattgccgagaaagtccggcaatgtcttcattgtcatctgaaggattagtaagcgaggctgaataatcctttgatatgtgttaaataacgtacgttacttgcttctttcattaatgatgcaggaagacctttcagcggagtagagttcgctccgatgatggcaaccgcgtctttacgtccgaggcttgcaagcgtaccagagtttacaggcttgaatgtttcaagcgtttttccttctaagtaagcgaacaggttgtaaccgacaagttcacccatctgccaagcgatttgagctgtcggcgggtacggacggccgtccggcgcaaagtatacagcgctgtctccgacaacaaatacatcttcatgagaagtagattgtaagaaatcgttcacagtcgcgcggccgcggttcacttcaaggccagattcaccgactaacgggttgccttgtacgccgcctgtccatacaaatgtgttggcaacgacttttgaaccgtctttcagatcaatgacgtttccttccacgtttgtaacaggaagacctgttaagaactcaacaccgcgtttttcaagactttttgtcgcgcgttcgataagatcatcaggaagaacaggaagaattttcggacctgcttcaactaatttcagtttgatttctgtcggatctacgccgtattttttcgtaaggttcggcatgatgtcagcaagttcaccgacaagctcaacacctgttaagccgccgccgccgataagaatcgttgcatcagcttcgtttttcgttttagagtattcacgcacacggtcttccacgtgtttgtatactttgttggcatcagcagcagatttcagcaccatgctgttttcttcgagtccaggaatgccgaaataagcagtaactgaaccaagaccgacaacaagcgcgtcataagtcagcttagaaccgtcagaaagggcaacttctttcttatcaactgagaaagaattgacttctgcgattttaatgtcaacgtcttttcctttcaggagtttttcaagcggcatagcaacagcctgttcagacacgttgccggctgcaaggcggtgcagttccgtaataatttggtgagtcgggaatttgttcacaacggttacgcgtgcttcatctttactgtaatgtttgcgaacggttaaagcagaaagaattccgccgtaaccagcgcctaaaatgacaatatgttttgacatcgtatatcctccgtcctttatatcaatttgaatctgagattatttttgtttttcgttcatgatttcaagatagctgttagcaaaacggaacagcttttgagcttgaggatctttcagcatgcgcagcaggccgaaaagtccgattgtctcattgcttgcatccgcgcggtcttttgcttcgatcgcagtagctgcgacttctttcgctgtttctttcaccggctcaagaatttctgtaagcgcacccactgtatcgctcttcaatacttcgtctgtcgctacagactgtgcaaaatcataagacttcgttaaaatatttactaactcagtcagttttggaagctgatccactaaaacagtcagtgattcttgaacttcaggttttagcagctgatcgataagatcgcgttggccttggctgacagatgcatttgtttgatcgattgtttctggcatatccgattctcctttactataagcagtatgctgatttttttggaaagggtagcctttcccctttcatgcagaaaagcatgaaaaagcaagattgtgaattcatgcacaatcatttacaaaaataaatgtttactacccagtttttcactttgccatattcagtattatttttatatcaacaaaaacaattgaataagtcaaaatttcttttttcctctctgaaaatagcaaacataaaaaaccccaatttgatttactcttatataataacactttttgaacaaaatttgaacgtgaattgtttcgtttatgaaattatttatatggcgggggtgtaataacgtttctttcagactatttttttacagaccatccgcttatcccctgtcattttccccacatttttaaaagcggtcccgtttttcccgtaaaggggtcatattccgggagcgggacacggctgatttcttttaaagttctatcatttttctccgtttttgtatcgtactgccggccgcccggataagcgccgatcacggtaaaatcagaactgcctgacagttttttatgtccggtgccggccggaatgaccgctgcgtctcccgtttcaagaacggcgtccgccccttgttctccgccgaacctcaataccgcctttccttttaccgcgacaagaacttcgtgcgtggtgctgtgaaaatggtgatacggaaacaccccgcccgtccagctgttcgaccaatcatgccggcggagaaccgtctctgctttccgcaccgtttcttcattaaataccgctttataaatgacaagcggaagattcgggttattcggaatgcagccgtcatcttcaaaataaagaacttgaatatcctctttctgcattgtgttcacctccgtatatgtctgtttcccattcatcatttattaaaacgctattttctcatattccattgcggagcctgccggtgaatagtatagtataaaaaaatatgtgtcaaaatgagggatttaatgaaagccatcttaatcggaatattggcgtctctgttttttgcagtcacatttattttaaacagggcgatggagctctctggcggaagctggatatggagctcttccctgcgttttctttttatggttccgtttttatttgtgatcgtttatgcgaaaggaaagtgggggccgctctggcatgaaatccggaaaaaaccgtttttttggctgaaatggagttttaccggcttcgtgcttttttatgctccgattacctttgcggcggcatacgggccgggctggctgatcgccggcacatggcagattacaattgtcgcgggcgtgcttctgtcgccgtttttctgcgaaacaaaagattccccggcgggtccggttctcgtcagacaaaagattccgcttatttcgctggttacttccgtcatcatcctgataggagccggcctgatacagcttcagcatgcaggctccctgtccggccgcacgataatactcagtgttgtgccggtggtcatcgccgcttttgcctatccgctcggcaaccgtaaaatgctggaacaatacggcggaaaactcgatacgtttcagcgcgtgctcggcatgacgctcgccagcttaccgttttggcttttgattgccgctttcggctggcacagagacggtcttccgtcaatgggacagacattccaatcctttatcgttgcactcagctcaggcgttatagcaacagtattatttttccgcgccaccgatatggtgaggaatgagccgcagaagctcgctgctgtagaagcgacacaatccggagaggttctttttgcactgatcggcgagatcgtctttttatccgcagcgtttccgtcacttctttcgtttgccggactgttcattattattgcgggaatggtcatgcatacattcgcttcccggcaggctgacccgaaaacggcggatcaaacatcagccgatctcaccggttcctgatttttttacgaaaggtgttattctgtatgaaagaaaaaattccggcaatatcttttctgtcagccggcaaacgctttgaacaaaacaatacagcctttgatgtcctcagcggagtaaccggacatatacaaaaaggctctattacggcgttgatagggccttccggcgcgggaaagagcacactgctgtcactgtgcaatctgatgaatacccctgatgaaggcgaagtgcttgtattcggaaaagacataaggcactgggacatcagagagctcagaaaaaccgcgggacttgcatttcaatcagctcccgttattgagggcacggtgcgggacaaccttctgctcggagaaaaactccacgggacacagcactatacgcccgaagagctcgcagattttacagatctgccgcaggagcttctggatcggaatgcaaaagaattatccggcgggcagcggcagaagctctcattagcgagaaccctcgccaacctgccgtccatcctgctgctcgatgaaatcacatctgctctggacccctcatctgtgctcatcattgagaaactgattatgaaactccatcggcaaaagcagctgacggttctgtggatcacccataatcttgaacaagcggaacggatatccgatacgatatggtttatggctgagggtcggctgttagagaccgcggaaacgaaaacgttctttaaagaaccgaaacacgaaaaggcccgggcgcttttacaaaggagcgggtgctgatatggattatctttctctgttattgacaagtgtatttgtcattatcgctttattcctatctaaatcttttaaagccggcgtagaaaaagatatgatcgtggcaactgtcagagccgtcattcagcttctcatcatcggctatgtgctgtcgctgatttttcacggtgatcatccggtgtttatcatattaatggtgcttctcatgctcacggccgcttcgcacaatgtcgccaaacggaaaaaaatgcgcatcggctcattttggcgcgtttttttgacactggctattgtggaaatcgtgacgcagggaattttactgacccttcacatcattccgtttacttcaagatatatgattccgataagcggcatggtcatcggaaactccatggtgctctcaagcctgtttttaaaccggctcagttcggaagcggagctgcggaaagaagaaattcagctgattctctctctcggcggaacgccaaagcaggcggtcaggcatatgttaacgtcgagtatgaagctcagtatgataccgacgcttgaaagccagaaaacattaggtctcgttcagcttcccggcatgatgactgggcagattttagctggagctgatccgatacaggcggtgcgctttcagctgttgattgtttttacaacgatggcctccgctcttcttacatgtatcatactcagcgccttgacatatccatcccttttcacggaacattggcaattaaaaaaattcagcagggaagcgtaggctttctccctgctgaatgattgtttatgataaggtcagagattcatagtaacgggataactcgataatcatcgctcccatccgctcgatgtccggagcaaggactctattcaccccttcatcccggatcgcttcagccgtcactttgccgactgcggcggcaagtacatgtgtttcgaatgcttgctgcaattcttttgcagaccctttttcttttgcataatcaaagagagaacgcacttgaatggcagtcgtaaaacatacggcgtcgacctcgccgtttaacagctctcccagcattttatcgaccgtctccctttcaggcggaatatgctgataaggcagaacagggaatacctccgctccgtttttctcaaggaattccgttaagacgggcgctttttccccgtgaagctggatcatgacttttttgtctttcaattcaaaccgttccaaggagcggatcaggcctcttgtcgtaccgtcttcatctgaagcatgcggcgtgacgccgagcttttttaaggccgcatatgttttatagcccctgcagccgatattcgcttcatgaacggccgctaaaaattcttctttcagaccgattttttccgatactgacaataacgtttccgtaccgatgccggtggtgaatatcacccagtcggctttttgctcagcaaatgttcttacgtcgggttcaatctgttcctccgccaggtatacggttccttggagggaacggacaactgccgttccgccctgcttttctattaatctcgtgatctcttctgttttccgcgaaccgccgatcgcaatccgttttccgttcaatccttttcccatcgctgtttttttcttcccttcagatgccgggcgccccatggcaggccgtcatttatttctattattgttacgcaatcagaccggaaaatcaagataggctccgttgaatcccccgtgcagttgctgtatcattaaccgggaaaaccgatttgattcgcggagggactttcaatcatggaaacaaaaaaagagttcgagacaaaaggctacgatacttcagtcatttatgagttcaatgaatatcctgatgttcacagcggccgatgtgataattgcgactatacgctgtttaaaagttcggtaaagggcggaaaatttttgcgggaatgccggagatgcggcatgaagaaaaacatataacaaaacaggcagacgtccggcacgctgcctgtttctcaatcaatgttcgacggccgcctctttcaaaaattcttcaatggcacaaacagcctgtttggcgccgcctgtttcttctattttctgctgcatgcttttcacgcggctgaggatgtttttatcgccgtatactttctgaacgtctttttgcagacgcgccgcagtgacttccttcggcggcagatgcacgccaagccccaattcatcgacacgttttgcggtgacctcttgttcgtgcatttgcggaacgacaacgagcgggacacccgcattcatcgcctccattgtactgttcatcccgccgtgagatatgaacagctttgctttctccagcacatcaagctgcggaacgtgctggcggatgataaagtgatcaggcacatccgaaaaactttccggatcaattgttgtgccgactgacataatgacccgccaatctgagtcccgaaacgcatcgatacacatctggtaaaattcgggccaggcgttaaacgccgttcccagtgagatgagcataagcggacggtcatcggctgcatcaatttccagacttcccgtatttgtgcgttcccccagggacggaccggcaaaacagaaccgttcatcaaaggtttcctgtttcggctgaaaggcccttggcataaagacaatattcagtttttcaggcatgaaaaattcttccattgtcatccgtttgagctgttcattttcaatttgctcctggtattcttctatcgcctgttttgccgcttccagtgtttcttcgtctcttcctaattgaaaatactcattcattgcatagctcgggcagaacttcacggccgggatgccgcaactgtccgcaaacaatttcccggcaagagctaaaaaatcaaacaggacgatatcaggaaggtcgtctttgtacagctcttccagctgcggaagcacttctgccgcttcttccagaaacatcacaaacgcgtcatttttattcacccgttcttttatcgtctccggatctgccttaaagcttgtgcggtataaaacgggaatggcacccgttttggcaacggaggcctcgaagtcctcagttgtagcgaatgtcactctgtgcccgcgattgacaagttcttcggcgacgggcagcgtgggattgacatggccgtgagcggctacattaataatggcgatatgtgtttgtttcatcttttttcttctcccctgttttcgtttatctccgcttctaaagagtccagcccgtacatgacactgttttggatcggctcaacccggacgggctccaagtgtgaaaaggcctttacaatgcctctcagcgcgacttccgcttcaagtctggcaagcggagcgcctaagcagaagtgtacgccgaacccgaaggaaaggtgcggatttgattggcgatgaatatcaaatacgtctgcctgctcaaatttgttttcatcacggttggcagacgcaatgtagcagagaacgatatctccgctttttaaacggcgtccgcacaattcagtgtcgtgccggaccgtccttctgacaaatggagcgggagcccgaaaacgaagcgtttcctccaccgtttgcgcaatgagagaaggatcatgcctcagttcttcataaaggcccggcgtctccaatatgctgtaaaccgcatttgaaatgagattagtcgttgtttcatttcccgccactaaaagcaggttgcaaaacgggatcaggtcttcggccgagagcttctctccctcttcttcctcttttatcaaaattgaaataatgtcttggccgggctgttttcgtttgctgtctattatttccgcaaaaaatgccgccagctctgtctcacattgatcacgttccttctgatttttctccgcctcttcaggactcgcatctttcggcatgctgacgagtatgtccgaccattttttaaactgatccatatgttcggacggaacacctaacaattcagaaatcacaatgaccggcaaaggataggagagatctttcacaatatcaatccgccctttgttttttgcctgtttcagcagattatcggtaatctcttcaattctcggctcccattccttcagtacgcggggagtaaaagcgcgattgacggcagatctaatttgggtatgcttcggcgggtccatattcagcatggactttgcaattgagcttttcatgtcagacataaggcttgagaaagtctctttatcactgatgacttttttggcatcatcgtataaaaacacactccaaaccttcgtttcttcatcaaattgaatgggactttcgcgtctcattttttcgtaccaaggaaaagggttgtatacgtccaggccgtcttttcctttcatcagggttctttggatggcttgtctcgggctcctcaggttactcacagttatcactcctgattacttcatatttgaatagttgatgtatcttgaattttatcctagcacatattttcaatttatttctattcataaccttaactattaacataacacaacaatagtcatgaatccggaagtgaaatttttcccaagaaagcagcgggagcgcacaaaaaacccgagccataggacaggctcgggagatgatgttcactcatcagtctgcggtttttgatgatgcttttggtcttcaggaggctgcgtatttctctccataccgcccgtatcagcacccatgcccttaaggaaagaaaacagcagagtgacggctttgttgatttccgggtcttttaaagcgcggacgatatcaaaataacccgtctttttgccgctgtctttctcctcgacagcctttgtgacccccgcattgagtttgacgataaacggttcaagctgttttacatcaagcatgccgaggactccggtcagcagcaggagatttttcagcatattggccgtttccggagtattcgcttttttcaccaggatatccattactttgtcgccctggccgaagagtccgcgcagcagcgccaaaacaccgcgctcgttcatgtgctcaagaatatggagtgactccaaaatcgcgtccttattttttaaaagagccgtctcgatctcttctaagtcctttcttcgtttgtcttcttctgtgacggtctgttttcggatgttgctgattgctttagccattttgctgtttccccctttttacggcgtctcccggaaatacataatctttacgcgcccatttccgctcaacccggacaccgatctgcggctgcgggtttccgtatcggaaattgattttcggaagcgggttaatgccttcttttttcaatatctccatcttcgctgaagtttctttataggccggtgtatcggtatccttatccgcatagctgctcgttaaaaggttaatagcggcgtcttttgaatcgttcatcggcagatatacctgcttgccttttacccggtctgtgataacgcatttgactttcacattcccgtatggcgatgtcagacggacaagcgttccgtcttcaagccctctttcttcagcgagttcgggtgagacctccagaaatacactcggtgttttttcggatatcccttttgatcggtaagtcagatttccttcatgaaaatgctcaagcagccgcccgttattcacatgaagatcatattcttcatcaaattccttcggctccgtccactgaacgggatagagaaccgctttgccgtctgaaaacggaaacttgtccgtaaataaaagcggtgaatcggttccgtccgctgcaaccggccattgcagtgaattgtagccttcgagccgttcataagtgacgcctgcgtagagcggcgaaagcatcgcagcttcttccataatgtctgccgggtgttcatagcgccaatcagccccgagccggttggcgatgtccgtaatgacctgccaatcgggctttgaatcgcccagcggttcaaacgctttgtaaagacgctgcaccctccgttccgtattcgtaaacgttccttctttttccagactcgggcttgccggaagcaccacatcggcgaactcagccgtacgcgaaagaaagatatcctgcaccacgaagaaatcaagcttttcaaaggcggcatgaacatggttgatattggagtcgacaagtcccatttcttctccttttaagtacatagacttcagttttcctgagtggatgccctcgatcatttcatgatttgtcattccgatttcttgcggcaggtctgttccccagccctgttcatactttttgcgggctttttcatccgttactttttcatagccggggaagctgtcaggcatactgccgaaatcactggcaccctgcacgttattatggccccgaagcggatatgagcctgccccgggcttgccgtaatttccggtcacaagaagcaggttggaaatggccgtgctcgtatcacttcctccgatatgctgggtgacccccattgcccacagtgcgcacacactgccggcttcatgaatcatccgggctactttgattaaggtgtccttgtccacaccggtatgtttttcagcatattccatcgtgtaaggttcaaggcttttcacgaattcatccagtccgttcactctctcattcagaaatgcagtatccgccaaatcgtgatcaagcaaatatttcgatacggcattcagccagacaatatctgatcccgcacgcggctggaaaaacacatcagagcgctcggccatttcatgttttcgcaagtcagccacgacgagcttctgtccgtgcagcttatgagaacgtttaatgcgtgtagacagaacggggtgagactcagacgtattcgagccgataatcagcacgagttctgctttttctatatctgtaattgatcctgagtcgccgccgtagccgacagtcctgaacaatccggccgtggcgggagactgacagtagcgtgagcagttgtcgacattattcgtgccgatcacggctcttgcaagtttctgcatcacgtatgattcttcattcgtgcatttggaagatgtgatgaaagcaagcgcgtccggcccgaaatgttcttttatatccgtaaatttatcggcgatcagctgcagtgcttcatcccattccgcttcccgaaacgagtctccttcccggataagcggtttggtaagacgcttttcactattgacgaaatcccagccgaatttccctttcacacacgtcgaaattccgtttgccggcgcctcagcctgaggttccacctttaaaatgtctcttcctttcgtccatatatcaaaactgcagccgacaccgcagtaggtgcatacggtttttgtctttttgattctttcatcgcgcatcgccgattccatatccgaaatggctaaaatcgacccgtatccggtttcgacgccttttgtgatgtcaatcatcggccgaagcgtctcttggctgatgcctgttaaataccccgcttcgccttccatgcctttttccatcatggcattgcacggacataccgtcgaacaatgtccgcaggagacgcatgatgattcattgatcggcacatcctgatcccaaatgacccgcgggtgtttccgatcccaatcgatgcttaaggtttcggttacctgtacgtcctgacaggcttcgacacagcgcccgcataaaatgcactgatcgggatcataccggtaaaacgggtttgattcatctttaggatacggtttttgatcaaacggaatgctttgatgattgattttcatttcctttacggtattatgtacttcgcagcttccattgttgtaatcacaaaccgtgcagtacaattcatggttatgcaaaatgttgtccatgccgataatctgcgctttttttacatcggacgacagcgtatcaatgatatctccgtcctttatttgcgcggaacacgaacgcaccagttccccgtttacatcaacgatacaggtatcgcatgtttcaatcggcccgagactcggatgatagcacacgtgcggtacgtcgattgaactattgttcaaaagctgcaaaacggtttgaccgtctgccgcttccatttcaaccccattgattgtaaccttctttgtatcagccattttcctttcccctttctatacccctctctacatcctctatgattcccagccggcctttcagtaaaacatctcgtttagctgcggaaacatacgggtatgagcggtagaaaggaggcattcacatatgttgaagaaaaaaacactcatcacgggattgtcggcagtgatgcttacgggaggcgcgttcggggcggaagcattttcagatacacagtccgtccatgccgcagccgcttcaaaatcggaaaatcaaagtgcaaaaaaactggtgaacagcctttatcaatcggcgttcaatggtgaaatgccccaaaatgtgaagggcctgaaaatcaatgaaagcacaagacaggacgtttacgataaaatcggagagccggaacaaaaagcagacagccgcaatccttttgatttatacagctggaacatgggaaaccccggttatggattttcctatcataaaaacggaaaaatctcagaaatccgctatttcggaacaggggttgaacggcgcttaaacctcggcagcgtcacccctgacatcttaagcaaacaaatcggcagcgctgacaaaattctgacggtgccgaaaacgggcgaaacagattacgtctatcatacggggcaatatgagctccacttcgtcatcggcagtgatcaaaaagcagaccacgtcaatttaaaagcaagataacgcgaaaaaagcggccttccgggccgtttttttcatagacagcttctccgacattccttacaatacatgggagtacaaaaaaaggggaacatgtgaagtgaatagacatccattgacatacggggcattgaccgtttttatcgtcgccctcggtttactatccagaacggcatacataaccgccctgctgcccggcatcataaacgcttatttaggggatgccctgtgggcggccatgatttttaccggattcggatttttatttcgaaacatccggacagaaacatccgccatcctcagcctctcgttctgctatctgattgaatgcagccagttatatcacgcgccgtggattgacgcgatcagaagcagcacgctcggcgggctgatccttggctggcaatttgtgtggagtgacattttcgcctataccgtcggagtatgcgcggccgcacttttagaatgggccgtgaaaagaaaccgccggctctcttcataatcggagcaagccgccgatatgaaggaatataaggaggtgtggaagctatggatatccctgcgttatcaatcgcaatgcaccaagcatctcttgtgcagaatgtaaatatcgcgttaacaaaaacggtcatgcagaatgcccaggccgctgcggaagaaacagtaaaaatgctgccgtcccagcacccgactgccggccatgtaattgacgtgaaggtgtaaaaaagatgccggatgataaccggcatctttttttgcctgatgtacgtacactataccgggcatacaggaatatggtaaacggaatcaatattactcaagggaggttttcctcttgtacgatcctttctatcatgaatacacagccgagagccaagaacgggtgccatatcattatccgcgaccgcctttttatttccccagaccatttccgtactatccgcggccatatccttatgttccgcggccgtatatcccattctatccttggtattaatgtttgaactcgagaaagaaaaagacccgcagacaggggagcccccctttctgctattccactttgaccgacaggatatacgggagggattgaactttctccattactgccgcttttccgcttttgcttttcacccttcctttcacttcaagcaccgctttattcaattcataggacgtaatgagaattccctttgcttcaagtgaagttaaaagttcatgcatgaccgctttctcctcaatttggaaactgacagacaaagagtgcgccgcaggtttaaacagaaaatttaaaagttctagcccgattaacgccaaaaccgtgccgctgatgccgatgacatacatccctgccccgatcgtcagcccgattcctgacgtagcccaaatccccgcggccgtcgtaagcccccgcacgacatgccgctgcaaaataatcgtgccggctcctaaaaatccgacgccgcttacgacctgcgccgccacccggctcggatcaaaagacgtatggctgttggataacaaatcaaaaaatccgtacttggaaacaatcatcattaaggcgctgcccacggccaccagaaagtgtgtcctcaaacccgcttccttcgccctgaattctctctccaacccaatcagggcaccaagcagacccgcaaccgccagacgaatcacaaaatcaagttccatcgtctctcccctttccttatctttttacccgctttttattccatgtatctttttcaatcagcacatctgctcggctgaaggagactgtattttaatatattctttagttcttcaacttattgtcagcaccgtttttatatgctaaaaagctttgtagcctgtggctcctttctcttccatctcccaaaacaaaacgcagttcaatttactcgtgtttaaaaacttctttcaatccgttaaattatatcgtattataagatataatcttaataaacgacaaggattgatgactatggcaaacgaaatactgcaattaaatggcctctggacagatatttattatcggctccgttatcagcatcatgaaaaaatcactcaccaaggtgtacggattctgcaagtcattcaaaaagagaaggcagtcggaataaaagacattgccgaagcgattcaagtatcacataataccgcttcggaacatataaagcgtttactcaagaaaaagtacgtttataaaaccagaagtgttgaggatgagcggaaagtcattttaaaacttaccagtttgggggcggatgtcctttaccgtcattccggtcttgatgaagaaaagcttaaacagcttctttttgacaacatgaacaatgaagaaaggacacttgtcttaaaagcatttagtttgatgaaggagcgggctgaagatgtttacgatcattaaaatcattgtctctgctgctattattgggattatcactgaaatatcaagaagaagcccgagttatggaggcattatagccgctttgccaattgtcagtatgctgagcatggtttggctgtacatccaaggagaaacgaaggagacattaagtcattttgcattcagtgtggcttccggcctcccctccacagtcattatgctggtcattatcggcatcgcccttcgtcattcactgtctttcattgccgcatcaggacttggactaacaggatggctgctattcttatatgctcaggattttatcgtaaaacatatcaacagtcagtaataggacccgaatacacgcaagcgcttgattgaacatacgagtaataaaaagaagacagggattccccctgtctgaagaccgattcagattacacagcctcaacagaaaaagacaccgcccgtacacaaaaacatcttgtgttatgaacggtgtccgtatctgtatggccataccggcatgaaaaaccgtctgatccctcaaacagaatgtccggcaatcacctcaaaaaacgaggtgaaatctgtcagtatcccgccatccgccagctgtttttcttcaaataacgcgcggttttttccgaacgggtcaatggcaataatcttgcctgcacctgcttttttcgccgctgtgagccccgaaaaggcatcttcaatgactacacattcttcaggtctaaggcctaatttctctgatgcgatgataaaaatatccggcgccggctttccggggaagcttccgtcatcaaacgtgactttgtcaaaatcaaaccactgccccaaatgaaagacatcaaagtaaaactcgacattttcctttaccgtagccgtggcgatggtcatcggcatttctgactttttcagatggttcaagacgccgatgagccccttcgtcagctttagctcatctttgttttcaaggcataattccctgtaataggcttctttttcaaaagacattctcttgatttcttcatttgttaaatcgccagaaataaaatacgtcaggatttcactgtttgttcggccgtgaatgtgaacgaaaatgtcttcatcagaaatcgcttttggagagtattttttcaccatgtaaaaccatgctttttcgtggagatgcgaatcttgaaacatagtgccgttgaaatcaaaaataacccctttcatcgaaccgccccccttttatttttttgcgattttgacatccacatattgctcataatgaatctgaacatctttcatcactttatcatccgtaatcagataatccatatcgtgtaagttgtagaacacgtaaaaatcttcccggttaaactttttattgtccgccagcaaaaatttcgtccgcgaattattcagcgcgatttggtgggcttctccttcttcaatgctgtaagaagaaatttcatcattatgtatgccgtttgcgctgatgaaggctttcgtaaaattgaatttttgcagattaccgttcacaatgggcccgacgaatgcaccggtattttttcggaagtcaccgccaatcaggatggtatccgccgtgtcgccatgctttaaaatatcaaacacgggatagttgttggtgataatccggatccgcttatgcagcagatgttgggctaaaagttcaattgtcgtgcccggccctaaaaaaacggtatcgccgtcatttacatatgaagctgcgagttccgcgattttccccttctcctccatttgaacacccagtttttcattatgcgataattcgtgatcaatggaataagatatgctctgtgcgcctccgtgaatgcgcacgatttttccggccttatccagctcatccagatctcttctcaccgtcatatcagaaacttccaattcatcgataatatcactcaccgtaataaatccccgcgcgtttacaaaatcgatgatttttaaaagacgctccttttttaacatgttcaatcatcccctcaactttacacacaatctaacacaccgcagcaacccggtcaacaaaaacaaacaattacaaacaacgctatcaaaatataaaacattgaaaaactcattatatccttgtaaatacagatattgtttccttaagaagctattgacagcaaaaatgtatgcgtttactattaaacaaaagataacaattacaaacattaaaaaactccaattcacacattggcgaaggaggattcagtaatgctcaaattacctcatggctttattttcggcggggcgactgcggcatatcaagcggaaggcgccacaaaagaaggcggcaaagggactgtagcctgggatgaatttcttgaaaaacaggggagattcagccctgatccggcaagtgatttttaccggcagtttccggaagatataaaactatgtgaaaaattcggcataaacggcatccgcctttctatagcctggacgagaattttccctgacggcacgggcgaaatcaatcaggaaggcgttgattactatcatcgtattttctcagagtgccaaaaacgcaacgtcaccccttttgtcacgcttcatcatttcgatacgccgaaaggattatttgatcagggagattttctcaaccgcgcctcaatagatgcgttcgtcagctatgcggaattttgctttaaagagttcagcgaaatccgatattggagcacgtttaatgaaatttatcccacagccaccaaccagtatttactgggggtttttccgccatctattaaaagcgatatcacaaaagtcattcagtgtcttcatcacatgatggtggcgcatgcgatgacagtcaacctctttaaagacagcggctatccgggagaaatcggtgtcgtccactcactggaaacaaaataccccgccagtgactcggaagaagaccgccacgcctgctttctggatgacgcattatcagtgagattcctcctggatgccacctacctcggctattattctgaggaaactatgcgtgctctggatgaaatctgtgaggcaaacggcgcttcatacgagtttgcagacagcgattttgacgtgatgaaaaaagcgtcaacgcgcaatgattatctcggcatcaatcattatcaatgccatttcgtcaaagcgtacgacggagaaaccgttatacaccataacggaacaggcgataagggcacttcggtctataaagtaaaaggaatcggcgagagaatttacaaagaaggcctgaaacggaccgattgggactggctcatttaccctgaaggcatgtatgacatgctgatgcgcatcaaacgggactatccgcaatataacaaaatgtacattaccgaaaacggcatgggctataaagatgagtttgaagacggcatcattatggataaagcaagaattgactatttaaaggtatatctggaagccatcagtaaagcgattagcgacggagtcaacgtaaagggatatttcttatggtccttaatggatttattttcatggaccaacggctacaacaaacgttacggtcttttttacgtcgatttcgacacccaaaaacggtatccgaaagaatcggcctactggtacaaacttgtaagtgaaacaaaaacaatcatttaacgatcacacatggtgaaatagtgtcttttcatcgtgtacgtctcaggaggttttttcatgacaaaggaagaattgcagatgctcggctttgaaattgtcgcctatgccggcgacgccagaagcactttattgaaagtcctgaaagaagtccgtgccggaaacttcgaaaacacggaagcagcattaaaaagcgccgatgaaaatttaaccctcgcccacaatgcgcaaacgaaaatgttagctgaagaagctgacggcaaggacatggaattagggtttattttcgttcacggtcaggaccatttaatgacaacccttttgctccgtgatcttattcaggattttatagcactttaccgaagccgccgataaggagtggaaaaatgaacggtatcatcaagcaaatcgaaaagggaaaaccgttttttgaaaaaatctcaagaaacatttatttaggcgcgatccgcgacggcttcttaactgcaatgcctgttattttattcgccagcattttcatcctcaccgccgctgtgccggaagtgttgggtttcacttggcccaaaagtgtttctgaatggctttggaaagtgtataactattcaatgggcgcccttggtctgattgttgcggcaacaagtgcgaaatgcctgagtgaatcaatgaaccgaaagatgccgaaaaacaaagggatcaatcccgtttcagcgatgcttgcttcagtcgtcgggtttcttattttaagcgtcacacaaatcgacggcgggttctcgacggaatacctcggcacgaaaggtcttttagccgcttttgtatccgctttcataacggtgaacgtttacagattctgcgtgctgaaaaatattacgattcaaatgcctaaagaagtaccgggaaccatttcacaaacattcaaagatgtttttccgttcgccttttccgttttggcaatggtaatcattgatttattgatcaggaacatgctgaacgtatccttcgcggaggctctctcctctctcttatcgccgctgttcaccgcagcagacgggtacctggggatctgtgtcatttggggaatgatggcgctgttctggtttgtcggcgttcacgggccttctattgtggagccggccatcgcagctattatttacgcaaatgtggaggcgaaccttcagcttcataatgccggtgagcaggcgtccaacgtgctgaccgtcggactcgggaatttcgtcggcacaatgggaggaaccggggcaacccttgttgttccgttcatctttcttcttttcgcgaaatccaagcaattgaaagcagtcggaaaagcatccgcagtgccggtgtctttcgctgtaaacgaacctcttctctttgctgcgccgatgattttaaatccttattttttcattccgtttattttaacgccgatgattaatgtctgtctgtttaaatttttcgttgatgtcatcggaatgaacagttttatgtatgttcttccgtgggctacaccggctcctgtcgggctgattctgggaaccggcatgagtctctcggctgttgttctcacagctgtgttaatcattgtcgatttcctgatatacctgccattctgtaaagcttatgacaatgtattagcggcgaaagaagccaaaaacaccgaatctgaaaccgcgctgcaaaaatcccgggagatacagcccgcaatagccggcgcctcagaagacgcggcctccgtcatcagcacaaaccttcaggaatcctcatccgccttggaacacagcaccaatgtattagtgctgtgcgccggagcgggaacgagcgccatgcttgcgaacgcactgacagagggcgccgaggaatataacgtgccgattaccgcttcagcaggcgcctacggatcccattacgacatcatgaaagatttcgatatgatcattttggcgccgcaagtcggctcttattatgatgacattaaagaagatgcagaccgccttcatgtgaaactcattgcaacgaaaggagcggaatatatcagcctcaccagaaattcacaaaaagccattcagttcatattggaacatacctcaaaataaaaggggcacagatttcgaaatggatctcgccctcagaaaccgcacctctgaagaatatccggatggcatttttcacccgcaaagacgtccatcattgagttttatccccccgccttaaagatgagctgacagaagtcaaaaggtatttgctgatgaacctcatgacatcgaagcggataatgacgtgacaccggaaaatacagccgctgttttacaaagaaaaaccgcaaatgtatgtttacgcgcgctgaccgatgcaggtgtttttaaaatgacagccgaaggaatgcaggcgtctcagcgttttaagaaggtactagagaatggcagctgaaattattcagcgaagccggatgggtgaaatcaatagatgaaaaaccaggaggtattgttgatgttcaaaaaccgggtgaaacgtgtatttgtaaacgcaatctgtctttctctcattttcaccgcttttacattcattgagaagtctcctaaagcaaaagcggacgccccgtttgcctatggcgctgatataggatggctgaaacaattagaggacgaaggtgtgcgctggctggatgacggcgggaaacagaaggatgctttgcagattcttaaagatcacgggataaatgcagtgagactgagagtctttgtgaatccgcccagcagctattattggcagaaagacggcacaacatggaccatgctcggctatagtgacaaagcaggcgtacttgctgcggccaaaagggcaaaagcgttagggatgaaagtaatggttgacttccattacagtgatgtgttcgccgatcccggccatcagatcaagccgaaccaatggaccggctactccaccggccagctgcaagcagccgtgtataaccatacgtacgacgttatgaaagaacttaaaaatcacggcatctcacctgattgggtgcaagtaggaaatgaaatgaattcaggaattttactgcccgacggcagcacgaacgatttcagcaaattgaccggattactgaacaaaggctatgacgccgtgaaatccgtcagcccggccaccaaagtaatcagccatttggcgcacggcacggacaacagtctattcagatggtggtttgatcaattctttaaaaatggcggcaaaaccgacatcatcggcgtttcgttctacccctattgggagggtaagccatattgggagctcaccggccatttatcctctaatttaaatgacatcgcctcacgctacaacaaggaagtcatggtggttgaactgggcggagatgaaaataacccgaaagattcctactggactataaaagacaccataaaactggtgaaagccgttccgaacggcaaaggaatcggcgtgttttactgggagcccgaagctcactccagcgttctgtcagacgcgtatccattaggcgcaaccgccaaagtgtctaaaaacgtcttaaaatacacaaccgcaatcgacgcttttcgtgacgccgcaacaggaaaacataattgatgcgaatcttgttttaccaattcgagttatttaaactttcatagcaagacaaaaaaagcaggctctttgtccagcctgctttttagtaaggactcatacgctattcaaagtaaaacagcaagcggacattgcgctgtagaggcagcctgttataatttttgaaacagagcaagtgacgaatacggaagacgtttctgttaaaaagccgcttttataacagaatccttcttaatgacagcgcctccctccttaccgattgcagtcaatatctctgcggcctatcgctcagcccccaaataataactttacgattgttgtaatagaaacaaaaattttataatattgtgtaagcaccactgagcaggaggacaggccatggacaaaaaagaacagctcctcacgaatttcagggacttttttaacaagatggtgtggcttaataggctgaagatggaagaaagccttaaggagtataagccttctgaagtgcattgcatcgaattcatcgaaaaaattgaagacgccaatgtcactaaacttgcggaatccctttatatgacaaaaggcgccataagtaagttaactaagaagcttataaataaaggccttatcgaaagctatcagaagccggttaacaagaaagaaatctattttaggcttactgagcaagggaaagtcatttataaaattcatgaggaattgcacacagagtttcgagaacgggacaaaatcgtgtttgaacaagtaactgatgaacaatttgacacgatgctgagcttcgtggaaacttacagcaggcatttggattcagaaataaagaaacttggtgcagacattaagacagaataaatttaaatgaaaccataggcagcccctttttgagaacgggctgccttttcatcctcctcttattgttgacaaagaaacaaaataactctattattttgttgacaaggaaacaaagttagcgattttgagaggagaataatatgtcaaaacataaaagaaaggaaccccggctgccaaaagaagttctcacagccgcctgggctattgcactgggagcaatcgctccaatgcttgactcaacgatggtgaacatcgccatcgacaaattgactaaagatttcaacacgacattggctaccgttcaatggtccgttacaggctatgtgttagcacttgcgattgcagtacccgtatccggctggcttatgaatcaatataacggtaagaaaatcttcgtcggctcagtcatcgcctttggtgtcatttctgtatttgcgggaatgagccgtgacgtttccagcttcatcttcttccgtttgcttcaaggattcagcgctggcattattactccgctaatgtcaacactcctggttaaaacagcaggtccggaaaacctgggaaaagtgatggcaatcgtcagcacccctatgatcttcggcccgattttaggacctgtcatcggaggcttcatcgttcaaggcgcttcgtggcattggattttcttcatcaacgtgttcatcgttttgattgctgcaccgcttatgatgaaaaccattccagactttgaaccattcaacaaagatcgtaaactcgatattttcgggattatcaatttgtccttaatgagcgcggcattgatttacggtattacgaaagcagcggatcatgcatcatttaataatatcgatacaattttatgggcgggcattggtcttgtatcagcagccatttacctcgtatataatctgatcagaaaaaatcaaaccgtgctgccgatgaatttgtttgcacacaagagcttcacagcatctgcgatcggtttgtttttagcgaatattgccatcatgggaccgatgttaattcttccgctgttctttcaaaactttcgtcatttcacggcaatcgaagcagcgctttccttaattccccaaggagtcgggatgctcgttaccaggccgctgatcggaaaaatgatcgataagatcggtgcgaaatacgtggttatggtcagtcttgttctttctcttatcgggtctgtcccgctgatctatatcaccgataaaacaagtttgatttggatttccgtcgtattgttcatccggggcgccagttttggaggaattatgcttccgttaacgagcgacgcttatacaggacttgacggcaaacagcttccggaagcgggtgtcggtattaatatgattgaaaatcttgggtccagctttggatcagctgtgatcgccaccgttaccgcaaccgtcatacaaggattgcagccaacgattgaaaacagtttaaagggctaccatgccggatttttagtctccgtcatcatccttgcggtcatcttcattccaagtctgttccttacccataaaaagactgcgatataaagaactttttatcgtctccctgagaactaagagaaatgaactttaaagtaaaaaacccttgctcagcaagggttttagtgaatgaaactgagattgttgttgacagagtcggccacaatataaaagccttttactcactcacattgcttttcagtatccattctacttccgttaattcttgtttttgaacgtcttttgtgtgttttttcgtgaaatggactttaacagcttcttcgttttcccaaatctcccaaagcatgattttgcgttctgatggttcgagcggataagcatggaattgaatacagccttcttctttgttcgtttcttcctcaagttttttaaattccttcattatttcattaaggtctttatcgctgatgatttttaagcatgccgttatgtaatgcattgaaattccccctcttcccatcattttatggtttttcattataacatcgaaaccggcataccgcattctcaacatataaaaaaccgttcataaaaaatgaacggccgtgtgtaaaaagtttatttgaggtcatcaagggcgacttttgcagcctcggcgataagagcattatcatactcggcatctttcgtaaaccgttttgacaggatggccaaaacaataggagctctgtcaggcggccaaacaatagcaatgtcgtttcgtgttccgtaacttccggctccggatttatcgccgacttcccatcccgcaggagcgcctgcccgaatcagttcgtctccggtagcgttgccccgcatccaatcagttaagatcgtccgcttgtcagtcgtgagagtgttacccaaagtgaaagctttaaggtcggttgccagcgcttttgcggtgcttgtgtcacgaatatccccagggattgcagagttcagatccgtctcgaatcgatcagctttcgttacatgatccccgatctgtttcagtgatttttcgaaacctttaggaccgccaagctgctgcagcaatatgttcccggcggtattatcgctgtaacggatagcggcttctgagatttctttcaggctcatgcctgtatccaggtgtttttctgtgatcggagaatatgtaacaagatcttctttggtgtatcggatgacgtcattaagtttttcaatcggtttttgcttcaggacagccgctgcggccaggactttataggttgatgcgtaagcgaatcgttcatttggccggtaggcgattgtcttgtttgaccccgtatcaatcgcataaactccaagcctggcatcaaattttttctcaagctgaacaaatttttgattcgttatacagcttgtcatttttgtgttttctatggattttgcttcagcatgcgttgagccgaataaagaattgaaaccggtaaaactgacacataaaagcccaatacatattccaaattttaatgtcgctttccttttcacattcatcagacctcctacttcaatgattttgtataccccttctaattaacatcacaaacaggaaaacagtcaatatatttcctggagaatgttttccgtgacagttaggaaatcagctgaaaaggttaatttaaaacgtcctcacgttaaaacaatcagagtcaatcaatcgagtagaaatgcgtcctgcccctacgaaggtggtcaaggtccgcactttaaaaatagatcattgataatactctgataggaaagcccagataataatgaagctgtaaatttgaaagagtttatagacgaaattaaaacccctattactgactcaaaccaactaactgtatctgcagcctctggtaaggggtacagtggttatgctgcgatgaagtgtttcaacaggcgatgcttttgcagtgactactaataaaatacagttgaagtcaatctaacggctgaacagataaacgataaaaagtttatccagtagcatgatagtgatattgaattcactcttggatgggtgcagaacagaagaataattttttcatgaatgtcccttttcttttcaacgtatatcgatgtgtgtatggcatgaaagcagttcttggaccctatcctccttcaaatgcatccacaacagctacaattacagatttaccataatccaataatagggaaaggaaagaaagctgtgtcctttccctattgctcctcctgctttttgtattctgcgatttccttaggggtagccttccggactccgtctgcgtctgtcctgtttgccacttgagcgccttccatgttttttatctcaccgactactcccaaatgctctaaatacacataatcaccaatcttgaaacgattcagcttggcctgctcctccgtcatgctcctgtattcagttgcggctttcatttttaattcagccagacacatttgacaaagggttactgttacagaattgccgttaaaatcagtaaacgaaactgatctgacagattccttttccggatgcatcgcgcatgttttcttcataggtgatggccgtgtaaattcaatcatgccgcttcctccttaaaaaatgtctttttgtccctctgacataactccggatgaatgggaagttccatactcccgcattcgaaccgtcacactgcgttttgtcatttttccgtattggatatacggaactgcttcgcccattcatcaaagctgtatgcgtaatcaacgctttcaatgaaactgatttcctccttctaacggattttcatacatccttcatagctgtaagcccatatttctttataatccctcagctcgccgcattccctgttatgatgaagtttctaaagctgttgaccagtttccacatgttacctccatgcgaaaagccgctaattcatatgggtaaacgtcagccctcgtgaatcatcaacgaagaacagttttcttaaatcataaagacgctatgcgatcctttgacttcggtagaatgtccggtgatcaatgcttgcgataagctattaacccaccctccctttgggatataaagggaagggagaaattctcggaagaaacgtagaacaagggtcaaatgttgctgaggatgtcaccaacgcaaaaatagtgttgaaaaaaagtataaatggggagtttattttaactggttatcctataaaataaaggagttctaattcactatttacgataattatgatagtttggaagaattaagtgatttcccagacggaacatttcaccaggacatgggttcaccaaaacaagcccttgaaaacttcataactgaatccagcaaagaatgcctagttttcacaataaaattttgtgaagcatttttaaatagtgacatatctgaacaagaaaaagaaagctttataaaatcaaactcggagatttattttccagcgattgaattaacccccatacaatggttagaaaaagtaataactcaaataaaagaaactctctaggtaaaagaaagcccctctcataagagaagggctttatctatacgtggactggaatcatttaaccgaaatctgttttttgttaagaggttttgtcactttgattactgcttttatttgttgagtactcatttatttcaaaagtaaggatattcttaaagataacatgatcttttctgctctcaaacggtccaatgttattaccgtgcttgtcaatctcgtatctcgaagggcctgttcctgaatctttttgatcgtaccagttaatgaaatcatttacctctttcatcgaaagatcaaattctttttcaagtcctgttgtcattgttatagtaaggatagctcgatcatcgtgcccttcctcaggaatattgccaccagaactcggatctcccaagttatcatctgggtttttctctgaatacacctgtactgttttcatcatacctgaagtatctacaccaatagagccacctttattagttcccccgataataaaaatattattattaatagttgccgcacctgcagctattcgagaactggttagattttgaaaattgttaactgtatttgcaatcgggtcataaattactgaaccatttgatgcttttttacttgaatctgatcctcccattaaatatattttattattgtataccgtagaagctatatagcttaatttattcatcaaagagtatttaaaggtccaattatcagttttgggatcatactcaaaaatgctattactcaaaccacttttattttcgccaccaatggcatagattttttcttttactgttgctgtgcttaaagctcttaatggaatcggcagggaacttttttcagaccaggttttagtctcagtattgtaaatataagtattggaagttggaccttcactaggattaaatccacctattaaataaatatccttccctataactgttgcagatgatcccgttagaggtttaggtatttctacaccttttgtccatgaatctgtgttaatgtcatatatttcaacagtttttaaataggtcttcgaaccagaattatcctcgccataacctccgattacatagattttatgttcaataactgcaatagcagcaccttctctcccttcattcatagaaactttttcaatccatttattttgtttaggatcatatacataaatttggttttgaactttgccgttattattaccaccaattacatagattttaccgtcaataaccgctgtactaaaaagagatagtcctttcggtaaatcttctttatcttcccaagttttcactccagtttgatctgcatcttgagctttcactggtacagtagtagtgagtaacaggcttgaaaaaatgagaaataaaactataattaggtttttattcaaagaaatcactctccaaaaagttaatctagaaaagaacaatactattatcggttaatttttaaacttgtttataaataatgttcttcactttgtaaagtattagttctgctaccaacctatttataaacctgaaactttccaaacggaattttccgtttttatgggacatttccaccttctgatttcattgaagacattgtagccaatgaatacttgaaattgatttaagaagtattggatggttctattgaagaatataagattcaattaaacaccaccccatagcatatataaaagaagatcaaacagtcatagaacacctttattcagaaagtgaaaacgataaaagctccatggaaacagaaaaattcaaagaacttatgctcgtctggagagacaagatcccacaaaggtataagagtgatgattgaaactttaggttccttgaaatttaagggatctttttattacttcaataccgcttcaagtttcgctttgttttcgatccataaatataatctgaagaactaattaggaaccgtctgacacaaggcacgtatcttcttgttttatctgtaccctctgtaataactcttcatcagtcttaccgatatgtctatcaattagatgcccgtcttttgcttcatgagcagctaatccaccgccgggtgccagaggcgtactatcaccttgtttgacattacctatgcccatgttgttagaagtttcagatcttctgagaacaataaaaccttaactttaacaccaaatcattatgtagacggaccgattattgatgttgcatgatggaaaaataatctgagtgttcaaaaaaatgcaaacggtgagcaggtatacatcaaaatatattcaatttgtttttaaaataccggattgcctcatcttgctctttatttaaaatgttaatcattaaatcatgctcccttaagtataatgtttaagtgtttttatatgggggaatacgtgttaggaggtggtttatttggaaaataatcagaaaataacgctaaactcttctttcgcgttatccactcttattgtcttacttatagcattgttcccggcctattcctcttggtttgtcacgatattctttttaggatttgcactaatatacacatttgaaaaaaataagagtaaatcctcaaaattaattgccattatctcttatccattgtttgttgttgcattggtttacagcataataaacagtatgtaataatcctcccatctatagggagttagaaaactttccagttcatacgattctcaatcttcaggaatgtaaacagaataacgttccgcatcatcctctgaaatccggatccatttataatcccctacaaaccaaaaccgcggtgcagcttaagagtcagtattttgtgttttcaactcttgctgaagttcttttaaaaactgaatatcttaattcattcgttcctcctattcatctatttaaaatcacgattttaatttaattttaatgtgtttcatcttgagaaaatcccctttaattggtaaactcgtacctaacttacatacgagtgggtgttgccttgaataaaacaatcggaattactggattaatcattagcctagcagtgcaatcattttcggctgatgaatcgctatcccacaagattgctacggctttgttatttgtatcaataatgatttataactttgaacatgctaaagattattctaaaaagtcacttgtaattttaggagttacctttattctttttatgctaggaatttatcaacttctctcttttaccagcgattactttgaaaagcttaatgtgaattttagatatatcctcttatttgaaatagcattaattattgcattggtaacgattgcagtaaacgtaatgaagtacattgcgaatcggttaaggaaatcacctaatggtaaagggttataactctttggcttttttatgctaaatgcttctttctatgcgatcttttatgttcaaatgcgatatcaacttttaccggttcctgctcttttgctactcgttccgtaacaacaatcagttgtccatttgcctggcggtcaacgctatgaactgaatatcctttggcagcgtaatattcaccaataacctcatcaacgtggttgctaagtagatttgtcttaatcatctaaataacctccatttattgtatttttattctctatttgtttatatttattccatcttcagccacactctaatccatctctagtacagtttccgggtctatcacaacctttttgatttcgccttctttcaattctcaataaattcactataattgctcagctgaaataagaagattgtctttaaggcaaagcatttcctctatctgtttaccatgtgatctaaagtgaaaatcaaaaatttctatagattcttattatatattgcaactaccataactccccttacaaatttcaaaagtaataattcttaaaacatcttaatattcgcattcaaatgacattagttgacacaaaaattccatatatatggtaataacttcgctatttctctaataacttaaaccatataatggaattgcaagaaaaaatatataaaatgggggatttacatgagttacaaaaaagtattaacaggtgttgcattatcggttggtttacttgtttcaggatctcctgcgttcgctgcaagcgcaagcacggatcaagaaatagcaaatgttgcaagtgatgattttaaagctcaagctatcacttgggatctacctagcactacaggtatttttgccaacacatttgatcgagacggaatccgctggtatttaaaaggtattacaaaagtctcggaaggccattggattggtcattacgaaggtgtacgattataaagattgcaattgggggcttctagctcccttttttaacttcaaaaaccacttcttcgagtaatattaaaatatgaacttactatagcgttttattattgattattttgcccagtcctctctgaataaaaaaatccttttattgtgattctgttgccttaattaaaaatctcattctttccttctttgttttggtgaaatcgttgcattttttcaaaatgtcctgaaacaagtgaaatggaattggatttaaaccaaggattctgaccttattacaatagcccccgtaataggcttactcgtattccttctgctctgatcttgaagtaaatggattcacttgtcttctcccttctgactaactaaatatcttaataacattctttaattcaacatttaaattctgcgccaaacaatgaaatggcttatcatgttggttcaaatgtttattctcaaagtgcgctacgaaatcttagctcgtattcgaataactgtactatcgggattgaaatgggccaaaacgatatgacaggtaagcctcaggcgcaacatatgaaaaaacattagagctagcttgctccctcttgaaaaaatacggcctgacacacgaaaacctttggactcaccatcaggttgttgggtggaaagattgtcatagatacttcactaacaatccatcagattgggttcgatttgtgcaagacgcttctaaaattctaactggaaatctgtcacgattcctacccctactccaaccaacatcagttgaaactctgatgaaaagtttcatttgcggatttactatgtgaattcttggatcatctggaatctcaaataaccgggagccagtcttgattccataatcttttttaagtgcaggagacgctgctaagacaacacttccctgtctatccgtgtttccgactacagcgagataacatgtcattggattcaatcccattgttacagctgaaaccgaagcataaaaggatttcatatctacacaaagtatatttttacgtggaaactgtgagtaatcaatcattgtaagcaactcctatgatgtcattcatggtgatgtatacggtttgatcgtgatgatcttttatgtgtaatttgtgttgttcgtaattgagatattgaactgtaccgattaaatcctcagcaacccattctttaaagagcttaaactttagttctttattcagtgccattgcttcagaaaccaagatgtcaatctcctcaatttgttgttcatctaaagatggcttctccattttcgaaacatccaacaagtcatgttttagttgcgttaaatgttctggaagcatcatggaagtccatttgatcgctcctcgatctctaagcattttgaatcactcctttatcgatctaacattaacagaacaaacgttctttattcaatataaataagaacaatagttcgatgtagttgttggaaataaagtataaagttcaatgatatatgtaatattacataggagaatttcttttcgtacaaagagaatatgaaggtgaatgaagcaaagctccatgaatatttaaaagaaaatctgtctagagaagcaaaggaaaaatataagatttatatattcacagatgaggaggatcatttgttcagagaagatcatcgaaaatattttcaaaaaaacaaatttgataagtgaaaacgcccagcaattaaactggacgttaattcgctcctatttcaaagctaccctataatgtattaaattatagggtaatttttaaaaatgcttcgatggatatatagattactcctaatgaacattaattattctttatttttttttagtattcacgcgtaatttctttccgctttcttctttaacagaggatacatagtttttcgactttaatgcagttgccaacgctttattagttctattatttaagatctttattcgcctacctttttcaactatttcggagtaaggtttccccattttagttaaatattcagtaattaaatcattatcgatatactttatttgtcccgttagcaatgataacctagtatccattgttgcgggtgattcaagtaaaaagtcaagtagatcattggttattttcaggttatgctcattaatgaaataaattgtatcttcaaggatgtctttatttccatctgtcataaagttagattttaactgctgtacaaagtattctttgttaaattgagaaaagtctttgctatctatgagttgctttacatcatttgcatcaagcggaaaatctccttgttttttaataaactcatcagaatttcttacaacaagtcgagtatgaagtgcatcgaaatttaattttaactctttaaaattttcgaatgttagagataacaaatcattctcaatcattaattttgctcttgtttcagtgacatttccgaacggaaagtgatcccaagagtggatgctaggaatcaacatctcgaatgttttgtctgttatatctctactattaacgatttcttctgaaatatcttctaaaatcacttcgtcaaatctatcattaagtgcctctatattactctcagaaagcacacgccaattatctggatcatttaggaaatctgtcaggaagttcggaattgttttgttgtactcgatataagatgtaataacatttgaccagtctgcaatcattttattttcttgaatcactataggccacaattctttaggtaattcaccgatattcgagatggtaaaactttttttcatgataattgaatgtttaacttccacatctagcccttcccaatttaatagttccagtacactttcctctggttcctcagtttcctcagtaagtagaacttttttaacaaatactgcaatattttcatttacgtaatcaatgacagcctgttgaccagaatttttaactgcagcatacgttacactgggagtattatttaaaataaccgataaattattggtattgatttcgtacagattatgttgaacaacaaagtcgtatattgtttctgagtttagtatatgctccaaacgtttaaatttaactgaaagttttataagtagttctttcgttttcctttcttcaggtactagcgcaagaaaatcggagtgctttgataatttacaagatatagctgactctttatccattcggataatatcatcagtatcaacatatgcgagtatatctgccaagtattcattttttttctgttctgtataatcggatttatgttcaatataattccaaaaatcatcccacttattagatatcgattgaataaatgtagcttttattgtcgctctttctttaaaaccatctatgaaggtaagagatgctcctcttccatttaccaattgttcaattatatggtcataacaactttgataatcaggatgttccattatataattcaaaagatcatagttgagtacctctacttgcttaaattcatcaccagcaagcttcttcataattttagttttattctctaatggatattcaaaaggtagtgattcatggtttttaatactaaatacaaattgaatatcggataggctcaaattttccggataaaaataagtaatataatggttatacaattcatcaatatatccatggcgcaacaagtaaacaagtaactttttctcgtagatttcatccgaaaaaacggttttcgattcgcttttagcaattagtgtttgtaaagattgtacacttatttcttgtttttctttttttaattgtgatagttctttttttagctcttggattttattttgctctataactctaacggcttcttctctttcaaaatagtttggtttcctattgaaaacggttgcaatatctttaattgtcgctgtaccattcttgtctcttaaataacaatggacagtatcggcatttttcaacttttcaaaaaattgatctgtattagctgtgttgcttctaaatcgctcgccatctatctgaatataataactattaggtgaattcaaatttgatatccctaattcgcccaagtatataaaatttaattcagcaattgattttaatggttcaacttctgcactcgctattgtcatctctatttgttgtatttttgcatcaattaagttaatttgttccttaattatgcgttgtttttttgaaagagttcatataccaaccctttattatattgtaatttagaaaaatccacgggataaatattcttgtagattatcattgccaacaatttgttagcatcaagatcaatagcacttaatttttgttggtatattacaaattcattaaaaatattctttaatactctcatgtcatcaatgtaaattgttacatcttctagaaaataatcgtttaccaattccgagtaaggtgaatattttattttctttttaagcaaatctcctgaattagatgcattaataataggtattactgggattataaaatcaaaaaatttcgtacggtctttagttaacttatctgaatctacatctccaaaaatatcatcttttatcgcatatataaaaaccacacgtctatctatttgttctgaattatttataagttcattcaattccctcagtttttcaaaaatatcgataatatcaaagcgatctaaatcttcaaaaattacaacattatatttggaggcttcaaaaaaatacaatatttcatctaaatatttatcaaatattgaggagctctcttctcctgaattcttttctaacgttgcgttagcaattgtcaccttatttagttttaagttagcgtgaacaaaatgataaattcttttacatacaaataaaggatatattataaaaaaaagtgttaataatgtagttagtattatttgttgccgatctccaccaccaagactccttgaaattaatgtctcagcatatatgtctttaagtacatcaggattaataaggtatgtaccaactataatgaatgtaaaaaaggaaatcaattttaggattatactcttcgttcttatatgcttaattcttttaaaccttgagaaaggaagggttcggtcttgtacccggtatatcatttgttgcaggatgcttttctctaatttattttccacatcattgttatctgtgtggaatgtagctaaggatatatttaagaaactatattccttactatgttgttcctgataggtatttaatatgctactttttccagatccataagggccagtcagtgcgatatttttcacttttttattttttaacccccaacttagtgcttctgaatatttcccatcagtatcaacatcattgctaggagtaagatcttcaaagagactctctgccttaacattggattcatctaatttaatctgaagtttctgtaaccagttcataattttttgtttgaatttccccaaaaaaatatttcctttctatgcaatttttagattattaaattagcaagttgcaaatgccagtcgagatgaaaattaattacatggtatctttaactgaccttagttctatctctacaattgactttcatattttaaattgtaacatgagaggcaaaatatgtgtttaattaagtatgtaattaaatctctctttgagtttaaaccatcttaaaaattaagtctcttaaaatgaccattaacataaaaaaagaacttgcaaaatgcaggttctttttttattgtcaatttattgtgaatttttaacgacaagggcattttatgtatagtataatatttcctgtacattaaagcatgctcactcaagggagtcttgctcacctccatgtctcaaacagaggaggtgaggccaatgtcaacttttcaagtattagtactcatgcttggatttgggtcatttataattgcattgttgacctatataaaaaaatagacctcccttgagccctggaaaagtttaagggatggtctattcggtagatctgagcaagcccttttgtgggcagctttagtacaaacaatgacctgtgggtgttggcgcacccctggtcttcttttattttatgcattttttaagaaagaaatacgcaaccaatcaaatgtcttacagttctgattataacacattaagcgaaaccattgaaataatttgcaaaacttttgttttatggataaaactattattttatttggactcgataagtatctttaatgtatcaatgtgctttattactttccaaatacttttcatgttgtctttctaaaacattaatatcctctttaataatcttaacttcatatttttctttatcttcatcggataagttgtcgtttaaatagcgccgtaattcttcttcactttttgttttatccatcccaattgatatgactgggtctgtttctccaattccaaagctaaataagccaaattcatcccatgcactttctaatacttcctcagtggatctttgatttttaagaggatgtgaaactatgctatacatgatcacagaacaaacaataaccaagactccaattaatttctttttcattgtctcctccttttcatttcaagattaccacaaaatacaataaatggaaaaataattccttaccaacagtatcttattcattacgggttggttttgagaggataaatgctaatccgtatcttaaaaacgatctaaatagattagcataagtttaccgtcaatcaccgtttgcgagagtaacctctcatacattcacgggaattctattttaatttttttaggagttttacatattcaccatattcgtcttcgccaagaaataaaacggttgtaaagcccttcttttcatatagatgtcttgcgtttaagttatctgtatctacaccgagtgttatttcctcatatccaaggtgttttgcataatcaatcaaataatcaacaataataccgcctatcccacgatttcgatatccttctttaacaatcatacgagatagataaatgcgtttatctggaatagtataatctgggtcatttttttgaaaaactaatgatccttctcctataaactcgtcattcactgaataaataaaagtaattctgtttccgcttactaattcgtcgtaaaacatcttagccattttctttttcttttccacatcccaaatattgccacacttattgtagtcttcgggttttaatttctttatttggtacgaatccatagcctctctccctttttaaaattatttaagaaaaaagctctctttctgagagcttacctttgcaatacttttgtttaactgtttagtaatcatcatctaaatatcccatcatcttcttcaataatcaaaccatgaagtcagaaaaagaattagcgaccaaaaatgtgtctttcactccatctgtcatttcatgatccaaaaaataaacctttcctgttgcttcttctttcacacccagacaaatttgatctcctccgtcagcatcagcaatcggaataatccagtctggcatttgttcttcataagctactgtcattgatttaacatcaaagtctttatcatccacgccaaatccgtaaaacaaccccagtcttaaaagattattgctggctaaaggattttaagagtgggaataacacattgtcagcttgtatcgtgcttccaccatatcttattacaaaatctttgtacacctcatcaaggtttatgtttaattcgttttcaaatgcttaaatttttcttttgctttctgattcattgcttgaagcgttgcccatccaaaacaggacgggggtttacgttttatttcacaatcgtgatattatattgaatttataagagtaatttggtagatatacattttataagagaattactaacgattgacctcatctctatacttagaagttgatcgtttttgaaggtcgtccaaatttggagttgatatattcgcttcctttttcaattcatcaaatgtttcatataaggctataatctcgctaaaggagcactcaaaaaatttagccatctgaagtttgtgaaatattctcaaaccgtggtagacaaaatttcgatggttacgaaccatattcagttgaaatgctgggtcaattcgatatcccagtttttctaaaaccataaacccctcatccattacagaaatcatctgcattaatgcattcttatccttcgctatttttttaaagtcaaagttattgatataatggattgagttcatagcaataatcggtatgaagtgacttttaagccaaccatcaatattttcattaaaacttagtttatgtttcgcttccttaaaagccttctctaatatagatttaaatgataagtcaccgtctaagctaccgattaccatttgtcctcccccccgaataaaaataacacgaccattttcttccctcctccccccactaatttgaaaaccaaacgcaatattttttttaactttgctatttttatttaggaatgtttgcatatttgcagcatcagcgttattcccaacaatcacaatattgttacttatattttcagctagaatcgggagaaccgatgaaaattgattgtatttcatcaccacaaatatgagatcgtagtgttcttcaggttgtagtttatcaattacatttactgcatcgacagtattttttcgttggaaacgatgtcgaataacaattccatcttctttcaattgttcataccgcctccctctagctaaaatggaaacattgtttcctcctcgtaataatgagtgggcaagataacttcccaaaacaccagcaccataaaccaatactttcatctccgtcccctttccacttattctcatctaaatttcaccatagccttattaactgattaacagaaaatggttttatctcgttctgtaataatttttagctgtatagtatttccagtcccaaaaagcatccccgttcgacataatatatcggtctaaaaatatttcaaagtttaaatttaatggattatattctgaaccactttcaaatataaatagatagttagggtcaccatgattcactctatccttgtcgatcattaaatgacattcttccaacaaatagccaataggtattccattgataccttcaaacaaatcctcatactttagttcttcttctatatcttcaaggctgaatagatgaagtcctccaccaatattctcaccctctgcaagaatttcgaaaattttcgcaccattatgctgagaaataaacttcagataatcctcaggaagtgtgaatttatgattcgactgaaagttttggatttcattaagagaggctttggtcggagaaaaagtcacaaggccctctataatatatccttcagaacaaaacaatttaatggctcctttttcatctaaaagacttttcaaaccgtttatagtcttatggacaaagttagtcaataaaatcgcccccatattttcagaataaaacaccgagaatacgaatttgttaatcagtaacaattttattcataattgaagcagcattagaagtaaacaaaatataagtgttttttgctgttttaattactatcctatccgtagagccataaggaaaccctatccttactgcacttttctcttgtcctccatagttcggatccagaaatacaccgttgatttctttgattggaatttcaattttagatagttgccaattgataattaactttccatcagattttttaactttaatcccaagcaaaattgcattctcctttcaactatacggtcagttaaattttaacatattagacttttccttgatattaacatgttgagcaaacttcaatttataatatttggttttttttttataattaggaaggtttgtccgatatagagacagaacaaacaatttggaggaattacattgaagaaatggttattaggtattggccactcatactctaaaaatcaccctgaatccaccatatcatcaggattaataatcgccttatgatatgcataaaagatggattattaaaagcgacactgtatatattattgtttacgccggcatattccgcaaccgctcctctgaattttggttagcgatttctttcgggcttagacaaggtgaaattttaggtatacgtttcaaggatatagacttcaatactggggttttaagattcgaaaaataagtatgaacccgcacttgccggaatagcgcaggatattgaaaatactcacaatgtgaagaatactcctttattgaaaaatattattgaaggtcaaaaagagagtgtgctcagcaagtctgtgacttcaaattttagtacaggaaatagcaagtataccacaggtacaatgaaacatatttatcatggagaaattaataaacgcggtaaagcagttggctaccaccatgaaagtatgatgggcggaaagattataccaggtacagaaaagaagcctgacaaaaatggagtatatatggcgaaagttgaagtcgagtctgtaaaaaaaatagcggattcaagtttctttccaagagaatggaaccgcgctgacgtattaaaagcaattgacgaagcttatcataccagaaaacaagtacgttcaaataagtatagaggaatcacttcaacaggaattaaaattgaaatgtatttaaataatgacggaacaatagcaacagcatatccgttatataaaaaataatcttaaaggtgaccagagcacatgaaatatttatacaagtttgataaagatccatttggtgatataaaaatagttttaccagaagaaatcagtcttttctctgacttcattgaaaatattacaacaatagaacaaactgatgagtatatagaatacattcagaatgttttaaatgggatacatgaggattttgaaattgatttaaatgggataagtgtattgataaaaaaagatgttaccgatgttgaaaacccttttttgatcgacgacccttataaaaactcaatagaaacagaccaatttaaagagctattattaatatggagaaacaaaattcctgagatatttaaaggttaagtacattcattattctacgcggtgaaatttggttcttaacctttattgagccggtatttaaatttcccagagaccaagatattaaggcctttctcataagagatggactttatctatgttttcaataggatagactgtcttcagtccgagatcccatcaacatcaggctggcgacaaagaaccttgcattatacagcgaattattcaaattcagctcaaaaaaataatttcgtccccaattcgatgaatgatgacaaaatcaataaataaacaaagtaaaaaacccttgctacgcaagggtttcggctatgattccgactgggctcgaaccagcgacctctaccctgtcaaggtagcgattatcttctgatgcgaacagacgttttatttagaaaccttattttataaggtttgctgacaagtctttatgataaaaaatcttctgttttggctaaaaatgaacaagttggtccccaattcgtccccatctgtccccataaactttcaccttgacaaacaaacatatgttcgtttataatattattaagcattaaaaaagctcaccttttggcgggctttgataacttataattcatcttcatcttcaatttcgaggtcatctaggtcatctaggtcatcatattcttcaattcctgacgccaattgtccattttcctgttcgattcttcttaaaacttcctcaacttttgttctaattatatttcccaatctctgtacaaaatcaatttttagttgaggtgaccaatgatctctttcgcaattttcttcataacaacttatcaataatggaatgatcgtgttaaaaatgtatatagctatagcattatttttacgcgttcccgttagttgcataaaagcatggcccctatactcttgcggccatgttttaaaggttcctgttagccctatttctaatagtactctttcaaatccatactggattgcaggtctaatagctttcaactcttcattattgaatagaaaagttagtgttcctaagatagtagatattctacttccttcccctctcattgcatttaccctatctctagttttccccatatagctttctagcgccgttatatatacttgttgaccttcagacagaggctctcttggagtatctataaatcgtttaaatatccaatacaacaagtcttctgaaatattaaattctagcggtgttacatgtccccaacattctacagtaaaaatatctttaacaatggctttagctctattaatacctgcaaaaactatgccatataaacaattattcatttcaacaacaagaatatcaataatagtggagtttattctaagatccttactttttaaagtgccgtcagcattataccactctgcttcatttttttttctttcggtatacccttgaaaaaataaatactggagagtttgattttcaatttgaactctttcaaactcctctaaactaaaaccattcacaacccttacttcagaaattagatcttcagtccatccacgaacacttcttcttacttcagcacctcgttgaattctctgactgaattcctctatattttggaatgaatggaattcgaatatagaaaaacttagcaagttagatacctctttctcctagaaaatatcatttctagcttcaactttataattattagcttttatatcaaagaacaaccatataactatgtaaagaaagaatcttttgattttctttttagagatcggttctacagttgggattatgctcccgtaattcaaatcaaaagatttagataagattaaaactttaatatataaaagactttcaactttttttcgttgaatagctcgatcaatgtctacctgaaatttcattttttcttgaagcagtattttccctttcaaatcctgttcattgtcaatcttatagtctaaccattcagggatttcaacatttaatgacaatccaccaagtttataaataaatgtacgcaaaaaaagatttttataattaagtttacaatctatatggacagtgatatgcctatcgctaccttgcctaacataaaaataactatctgactttctgctgttattttccaaccctatttcaaacttaccgggatattttaaaaactcgataattaaactgataataattaagactattgctgaattaatcgtaaatcctaaattaggtttatcttttatttcatttgccaaagtatctgaaaaacgcgaaagaaaaacaacgatgtctatctttaaaaagtaaactataaatattgtaatagcaggactaaaaattgtcaaaaattttaatattttctttcttatttcgactagagattttaacataaacttgctttcctttttatagagagatctctttaattaaatttgtaacttcactaagaattgaaatatcgtcgattaaaagaacaccgttattatacagttggacatttgtgtagatccctattttatctgttatttgtaaagatacaaactgaatatctatgcattcatctaatataatccaatcaatttctttaaataaatttattttgctcttctctttttctattccagttgatcgattaattttttgaatatagtcatcaacatattcaatactttcagcaggaataggatcaataaatttcaatttgtttataaaaagatttcctttaacgcaactatctattaatctcatgaatttactagatgagataataacctgccttagatttagattcttaacttttttaagaagatccacataatcatttaacccataatcataagtgatcccgatgatgctttcagaaaaatagataagagaatcttctttaaaaatttcttttagatgttcaaaagtttcttcgttattaaataactcaaataatttcatctgcaacatcaggatcactcctctcaaaattttgtagctattagtatatattaatccaattagatgaaaatgtcatcaaaataaatctccgaaatattggtttatatataggtggcaaacataggactaaaatgcttaaatatctcgtataatctgcttaacttttgtaagaagcacgtcgatctcttagtgctgtacttgctgaaattctttcattcgaaaatggatgagttacagtataccgcaatacgtttttgcggcataccgcaatcacttttgatgtatactgagtgtatattcgaggaaacagggggtttccccccttgaaaaccttgaaacctgcagttgcgcttctagctttgccggcggaagcgctttttctccttttctcctcgctgcttcttttcattttggaaaatgtcataaaactgtttgcaaattgtgacaatccctgcaatggaaagaacccagtttctaaactcatccacttaaccacctcctaacacaagaattataccattttcatcctaaacaccaatatatttcatataaaaattactctaaagagacggatgctccgctagtcatttttacccaaccacatcaaatctctgctttctcttatctctattcaagggcaaaacagggaataaagatgcagaccaaatgattcatttttccttttcaatcgtacagcgaccattttcttcattcttccatggtaatatcttgttgaagattttcaaaagaaaggatatggtcatgaaagtttttgaagcaaacagcttgttgaccgctgccaaacagcgtgcgagtgaatacaaagaactgcgcggccagatggtcaatctaaaaaaagcgtttcaaggtatggctgacctcggtgacaacgacttttcaggccggggcgctgacaacatcaaagcctttttccaagaccacgccggcgtcacagacagctggcttgatctgatcgatatgaaaatcgcatttctcacaagccttcccggtaaggtcgaagatgccggactttccaattcgcatgtggaggaatcatttctggagcatgagctcacccacgccctcagtaaatcaaaggcgattatggaagagcagaaaaaagacatgcgctccatcctcggtgagatcgaagacatcatctcgctcgaattgttttcaaccgaaaacacggatcagaagctctcttcagcagacaaaaaaagaagcgaaacaatacataagctcggcaagctcgatcacgatctaatgaatgaatacgcagaaaccgaagcgaacgaacagttcatccaagctgacttccagcaacttcaaaatgccacgggcaaaggaaaaagcgccacgccgcttcactacaacgccaaagcgtaccgtgaaagcgacatccataagaaaaaaggcgatatcgcaagacattcggatgcttatttgacgattaaaaaggaagaagcgaaagagcgtgaaatcaaggatctgaagaaaaagctggctgatggcgtcaccgatccggatgagtatttggaaatcgccaaaaaggttggctatgagaatctcacccctgaacagcttgaatttgtttcatttctggaacagcgtaaagctttcatggataacggaaaagaagcattgcaaatcataggtgatggcgccaaaggtctgcttgttggtgtatacgatcttgccaaggataccggtgaaggagcacttcaactcggacggaatatcggttggacaattgacaacttaaacaaagatcctcaaaaagttctggatactgttctggaatacgattatctaggtgtctatcaaagtatggttgacacattgaaggatgattgggataaaaagatgattcacggggatgcatatacacggatgcactatgttacttacttgggcggaagtcttctgttattgaaaggcggaaagtcctctgtctcaacaggctcaaaagatcttgctaaagttgggaaggcggctagcgaaaagattaaaaatggcaattcatctgtcaagccttatgccaatagatataccccggcattagaagggattttacaagacgccgggaatactattaatgttaaaaatacgccgcttttaaagagattagttcaatcaaaggatgatttgtttactaaagccgcaccttatacttacagagatgaatacggaaacctcaaaacagttaacttaaaaatgggccatcttaaaaaccaaaaacatcctaaaactggagttccatataataaagacggtttcccaattttcaaagccaaatttgatacgaagattgattctaaactttataaggaaagcgattatttacaatttaaagatgcaaccttaaaattaaaagaagaaattgaaagagatcctttacttagaaatcaattcaatgaccttcaaatcgaaatgataaaagctggtgaaacaccagacggatatacttggcatcatcaccaagattcagggagaatgcaattagttgaccaaaaggtgcatcggcaaacaggccatacaggaggtcggcacctttggggtggtggaagtaagaacagataggagttggtcaatatgacagagtggagatttgccgaagaacccatcggggaaacaactgttaaaaaaatcgaaaaggctttagatattaagtttccaaacgactacatttcaactatattaaacaacaatggagcacgcccaagtaaaaagatttttgactatgaaaatacaaaaggcgcggtttttaatcgattacatggcctaactgaggatagttcaagttttattttagagatcttagaagattatcaggatggaagaatgctttcagggatagtccctttcgcctctgatcctttcggtaatgaaatctgtttcgattatcgtcagaataaagagaatccctctgtggttttctgggatcatgaaattgcttatgaagaccctgatggagctttgagtcatatatgtgattcatttacggaattggtagataagctctacgaagaatagaatcaaaaagtccgtataaacaaagcccttcccttttaaaaagggctttgtttatccttccagtttgcctttcgtttatcggtccgaatataccgcagcagtcaggaaattggaacagattaaaattaaattacaaaaaaagcccgcttataaacaagtgggcttttactgatcatacggccggtacttcttccgctcggcgtctaattcttttttaactgcttgtacatgttcccgcaagaacaaagccacagttcccacctttttaatcgccttaagccgaccgccgctgacaagctggcttacgcgctgtcggataacagaaagcagctcggcaacttcagtagccgtcaaaacttcatcttggataaacctaattttttcactttctttcatatcggctttctctccacatcatgaaaattccttttaacaaaataaacattacagccaggtataaaacaaatgctgtgattttcccaagggcaccagctgtttcgtaatcaatagtcacaataccagcaataatgataataagtgtgattcatatccatgttcagttctcgcttttcgctttccttcgtcgatttgtcgtagatgtattcaatcgtaatcaccatgccagttatagaagaatctagatcttaccctcgtccacttcagtgcctcttttcttcccacagtcaatagatagagaaaataaactccttcttcttaaaaaagttacttttcttaataatttagtttattaaggaaaattcaaggtaatcaccagcaaaattatggtattatagttcctattactttataccttatattataagggtcaaaagtaatggaattaacaagaattgaggtaataagaatgaaaaagcgcagtattattctaattttaatgctcgtatctatttgctctgttataataccaatgcacactagagcagaagaacaaattgattataaagcaatctataatcaagcaattaaagaaggagtaataaatcaatttgaattaagttatgatgattggttaaaagaaaatgtaggttttaaaaaaatttacgatgaaggcattcaagaagatgttttagaacccacccttagctacgaacaatggattaaactaaataattatgggcaagaacctaaagatgacaatacagagctcgtatcatatacaataaagggatcacccaacgccaaagtaactctattgtcaacaaacagctcaaatgttaaggtaacatcattgtccagtttttcagtaaaaccaggagacattttcattacaaattctacctcatcagctggaattataggccacagtgctattgctaatggctcaaatcacatcttagatatgcctggttatggaaacaaaagtgataataatagacagcttactgtgtcacaatgggtatcaaaatataacaatggttggatcaaagtttatcgattaaaaaatagtagcttagcagcccaagtaggaaaatatgcggacagacattattggtctactacagggtcttcaaaaaaaaatatacatattccttataaattaactccgcatctttatagtgtatcgcccagttattgttcaaaattaatctatgatgcctattggtttggttctggttcagcaagtgttctagtgaaacgttctggatatgttatgccatttaatttaatcgataatgattttacttcgaagtacagaccgtccttagttcatagatattaaatggaggaacataaaatgtttaaaaaaatagctcttgttcttttaacattagttgttataattggtggcatttctttaattgttcattttcacaatagaaaagtggccgaagataaaattgatcaatacatttcggattatggtatccccaaaaatgagattcaatctgaagagtatcctttatttacatctgtcagtgcaccagctggctttttcaaaactgtttatgtgaaaaatgaaaatgataaacaaaattattatatttttcactatgatccatctagcaaaaaagtaaagttttcagcagtagtagaaggaaatgaaatatccatgcatgataagttgatcaaaaaattgaaataccaaccttctgataaagtattgaatcaataaattaagtgaaataaaaagccctcatctgagggcttttttattagactattaataatgcaagcttcgtttttgttttaggcccataaatcccatcagcttttaatccattcatcaattggaatcgccttactgcacccgccgtcttcgcgccatatgcgccgtcgattccgaaattctttgcattcttatccgggtaatagcggagcgccgccagcgccgtttgaatctgttttacggcctcccctcgggtcaatgggcttgtgactttaaaagtacccgcaggcaggctaaattttgatttttgagtggatttaggctttgacgatgttgctttcttcttgttgccgcttttcagctcgttatcgcttttgatataggaaacattcacatatccgtggaatgtcttgccttttgaattggtgtattcaacatatccccatccgttgacagttgatccaagctgatattttacaatcgtgccattcggcaggttaagcaccatggaagaagaggcgctccgttgtgtacgtaaaacaaggccatcgcttgaaaccaccgtgtttttgatgaatcttcctgtgtctgtatgggtaacgtccggatttgatacaggcgccgttacaaccacaccatccattcgcttttcaacacgggtcttaaaatcggcaaaccctttagagttgcttacccacggctccgggcagattttatgtgtaatgtcgtaatgtcgaacaatgtcattgattggatcgagtttatacattttgcacaactcggcacaaacttgttctgcacgagcgatggtatccggatggaaagtgccgttcttttcaatgcaaagctccacgccgatagataagaaatttgcattcggtttcagcgccgcgacaccccggtaaggctgcccgttaacaaattgctgaacgtcattcgcatgataggccacctcattcaacggaatgatgcaaatagcctctgtacgatcgacaaaaatatgtgcagatgcaaacgtctgtttcttctcagacagatttctgttctgtgcggggagcgtttgaccaaagtatctataatgattggcaacagacgcgccagggtttgccgtgtaatgtacggccagtttcttcacgccgttgtttttaattcccggccgcgtccatttattaatatcaatatattggtttttaaatgctgacataaaaatctctcctattctgttttgaaatataaaaaggccgccgaacggcagcccttacttggttaaatcgtgctgttttaaaacggctttttgcttatggcctttttcagtcacatagttgtttttgaaccatgctaccagtgacatgatgatcgtaaacccgatggagccgcctaaataaaccgcgtccgcaaggtcattcacttgatcatctgcaatcggtagcacatctttaccaaacatcactaaaacttggtttaccagagcaataaaaagaagcacagtccggacgactgtacctttgtcgaattttttcatatgttattttcctccttatttttgcaacaggttatacatgatcgcgatagccccgccgataaaaccggtgctaactgccgttattatagcccctgtgatggtccgcttgatccaagtcgtattttcatcaattttgttcagcttttcgtttaatgaaatgatttgctgatcatgcctgtctgaagaacgttcaaggacacttacccgctgttcaagagtcttttgcccggctttaacctctgtaatttctttttgtaaagcattcacttccggtacctccgtcatttgtgacattagtacgccccccttttatctatctcatacgtttcacctccttcgaggcaaaataaaaaagccttatttattggcttctgtttgttcctcgtatggttgccctgttacttcctgaaactgatccggtgtaacatacgcagcagccacaccctctttcatatcgtcgatggtacaatcgttaaaacccattgcctgctttaccattgcggttgtcgcccacttgtagaacaaggcataaacccagaaattaagattcactggtcacccctccttccaattccaatactttaagctttaaggcagcaagctgtttacccattgaaacatttactgcttcagcctgctttcgtgctatgatttcatttgtaagctgcatcccaagagcttgctggccttcttcagcttgctttcttgcaagctcttcgaccgaaagttgttgcccgatcttgtaaagctgatctttaactggatcgggatcggtaactatctcttttttcaagctgtctttatattcttgatcagccgtttcgatccaagtattcttttctttatcaaatttaggccgccacattcccgcaccatcagccgataatggtgggatgtccgtagcgttatcaggcatcttatactctccggtttccggatcgagtgataattcagccggctttccaatataaatattgtcgcttccgtaagggaatatcagtttcatgaaatcaccttcctttctttaagttagtggaatatttatgtcgatatagtaaccgttggcctttgattcggttgttgccataataccagtaattttcatgtcgcctgaagcgtatacaattatcttgctgtacccagttgttccgctggttgcaaccaatttcaccacacctttacttggagcgcaggaagtgggtatgctgccgaagacaatttccctgtcagtaagaacatgaccatttaagtgaagcgtattccctacttttcgatattgaacaggtcgatcccctgttttggcaccgtttttgtacgtcacatctaaccaaggaatatcaatgtcagtaataagctcccgccaacccgtaaactcaccttccttgtgaattgttgaaatccatgtacggttatcataagagcgtgtggcaactattttttttaatccttgtggcggagccaagtcagcaggcacatccgatatatcataataataccaagctgcatcatcatcaccaggatggtttacaacgccggcaccaaaataaaagcctgtcggataatcaaaaagattctgccctttcattatttttattcgttgcccgtcttgtgttgtcaggggatagagttgcccgccattccacttgtccctttccacttgagaaatatggcgaatgccgttgttatcgtgttggcgaaacgcataatagtcggcctgtttcacattatcaacgttactaagcccgatctgctcctttgtaacctcatgtggattatctcttcgggcagccagttcatcagtatatgctttagcgtttttttcagccgcatcagctttgttttgggctcctgttgtcgtttccttcgcattccagttagtgcgctctgtggctgtaatatgacggtcattatcctttgtatgggcgtcaaaatctgctttggaagcctgaagtacattgtcaacgttaccgagccccacttgtgctttggttgtcttatgtgggttgtcaattcgtttttcgtgcttgtcagtataagctttggcatcagatacagcagaagaaacatcttccttcgttgctccgatcgtttgcaactctttcaaagcctgataggccgtatattgataccagttaaaccaatcggccggcgggtggtccatcggcttatacccttgatcaatggacgtttgcggcggccgctgaccggggttcccccattctggtaattcttttataaaaggcatatgcttcacactccttaaattggtaacgggtaatcatcttctggccggaagatgccccccagggtcccgccgtcttttccatcagaagaaaacccatattcgcttgtttctatggtgctggctgatgatgaaaaacagaaagtgccgtttaaatccacataagcaactcgaacccccgcagccaccgttttttgaacgatgttcgaaaattgcgtttcgctcattcctaccttacttaatgcctcgatcggcgcctttttcacaatgattgcagctggttcatcctggttgttttctttgctgctcacaatgtttatttcactcggcttgcagttcaatgttttcgccagcgcttcaataatccggtttgttgtcccgtctgacgcattccgggctacctttccacgaatgagcacgcggtatatttcatcagtagcccggccccgatcctgggccacgttatccccgagaaggtccaacgatttcccgcgcgccgcgtcaatatcccgccatagttccgccgttgtcagtgaattttttaatgctgtcaattgttcatcaacaattaaaaaaagcttcccgatattgctcttttcatctttcaagaacgcatcagtaagctttcctattaaatccttgatcatatcagattcaccactatttcagagaagtgaacttgcgcaacttctctcggttcaatggtgatatttgactgaccgagaaccgcctcatccttcccgatttgtatagtcacatctgaaaccccattcacctgatatacagcgttaaaaagttgcgacagaataacgtcgtcacccatctgcgatccggtaaaagatgaaccattttcatcaatcccgccaattttatatacgagattgtttttgatctgactcacgccgtcagcagggaatgaagcgtttgtttttaaatcgagctgcacataaattttcacttctttagcaaaatcaaatttgacatcgtgatccaaaccacttgcatctgtaatgacaaccgattgttctccgactgtttcaataccggccgccacgctatcaaatagagcttgggccacgtctatttttgttcccccgagaacataagcatgaatgcttttcggtggattgccgtctgcatccgtttgcatggtattattcgcgactatattcgctgaacgaacgcccgaaacggcaagcaatgccgaaatgatgccgctattcgtagaagcagaactgccttcaactgattttttaattcgcgcccgaaattccggatcagattcctcgtcagtgccgccggaagcagcttccggattattcactgaataaactccctctaacgtctcagcctgttcagtaatggtattggccgcgacattgttaataatccctttagacagcgatacagccgcccctgtgcccgttccatcatccccgattacaacatcttcgattagttcaaaataaataccggattccgttgtatattgggtttgttcttctatgacgaatccaggttccccggtaaaaaacagagttgtgaccgcctcagccgccggctcccggcttataccgaaattacttcccaacctgtccaactgaacgccctccgatttactgacaaagccgctattataaacccgctctgcaatgtcccaaattcccgccaaaaaccaagcaaagatacgtaggataatgcctaatggcgttttgcttgacgtgtttatatcttcgccaaacagctccttcgctttatcctccatgccgtcaagaagctccgaataggtctgccgttggaatcctgtttcattaagcaagatcaacacccctaagctcgattgtttgatcatcctctttattcattttcaagtggacagatagatttcgtgtctctttatcgtgagaaaactcaactgattcaacgctagcaattcgctcgtcttgtgttacagcattaataatgtcgtattgcgcctcttcttgatcaaagcctttcccgagaatgttactccgatccaagccgaaatgttcatccagagtaaattcccctaaccgtgtttttaaggttaattcgactgattgagcaatttcctcgttcccctcaaccatctgaagagtaccgttttcaaaacatagatcaccgtctacaagcttgagcgttttcatccttcccacactcctatgaccaccggatcattgatactgtgcgttcgtcgagaatcaggatcaaacgttttgttcccatccaagttatcaagagatctttcagcgaatgaaacaaaaaccgaggaaccaacctttatattaggctcaacatgctttaaaactggtgcatgttcgatcaacgggtattcatgaaggtattcaccatcattcataagaaacaacaattgcagatcagcagtatgcttttctgaattgtatttcacaacgcgagccggagccagtgtatggatggatagtttgattcttttctcaaaagcatcgaaaaacctcgtcgctttactcattacatcaccttgcattctgtgaaaaagtctcttccatcaaacgaatgagtaccctctttcactcgatattttccttttgctgttttgctgttgatttcaataattgaagcaacagcgatacggtgctgaagaagacacttcgccttataacctttgaaattatcttcctcaacctgctcaggtgtctcaattagtccggtggcctcttctaatttgaaacgctcatcatcgccctgattaagtgggcgaataaccggtttccctcgtcgatagtacataacggctcctgcatcatgtatgacttcttctaaattattttctattaagccagtcacccggtaaccctttttgtacaccttatttttcggcaggataatatttttcactttaattccgagaacgcgcagcagtttatctacaatttgcctcgatgtggttcctgctttaaaagtaatcttcatgtatcgtttgcgatacctaacctcttcccgcgtcccgtaattcctgacagtcttgtacgttcggccgtttttgtctttcctgacagtaacaaccggttttgcaagcttatatctttttttgacataatatttctcagcaggatcagcattggcagttgtcactttcatatgggtataatcgtcaccgtcttttgaatagatcgacgtcaccttatccaagccgctccagttattcagaacctttgtcactttgccaatcgtcaaaacgccgtagtcgtctcgataacccgcctgaaccgttatcgtgctgcctttttttatcttgttgatcgaatccttgctaagattgtaaatctcaacttttgtttcattgggtttgaaatcatcgtcgaagggcacttcaaaatgaatttctaaatccttgtaatcaaatgtgatctgcgaactgccgttatcaatggttatcttgacgacccggccaaacagttttttattcgtcgtcgccaatgtcatccccctccgatccatcagctacatcatcaatataaagaaacacggtttccatgaaattcttatatgtaacccgtgtttctgaatttgattcatctaaagggataagggcgggagccggcagattttcatttacaatgtcatcccataaaggaacattgagtataagcttctcgcccagaacgataggcgtcatatcctgctcatataaatccagtgaaaaactatcatcggattgattgtaatttatgcgcagaataaacgtgtcatccgctaaatcaaattcgaactgctgcggaatatcctctttatcaaaaggaatatagtccctcgtagccatttcccgtaccctccctatttaatccgcatctttacccctataggtattcttctgtcaggccatggattgagccgcctcaatgcgctgacagtagttccgtatttgcgggcgcagccccaatacgtatcaccctttttcaccttgtgataaaccttattggatttttttgtggtttttttcttgttggcctttttctttttcccggctgttttcactttcttcttaacccacgggctttttgcaatacggatttcttgtaaagagattgttatcgcaaacccgtttgaaaattcccctgtatcgcggtcgattttcgtaatgatcacgtcttttgcgacctttcgcccggtataggttaggagattgccggcatatgcttgcttttttaaatattcatagtcgctgtttgccgtcttcccaagcaaataaccggaaacacttgtggtttccggttttctctgcacatggtcggtaatcggcacgcctttttcaacgggataagatgtgacttccacatccgccccgtctgattctttttcgttaacaagattgaccttcccaagcttcgccaattaataaaccccctccgcttgaaaaagagccgccaggctgtcgtaagagtcttccagtgattgggtgatagcctttgaaatatcagtttcaacttttgcacttccgccctcaacttttacattgatagacgggctgaatgtaatatttacagacgttccaccgctgctgcttgctgctttttctggtgtatatccagtttcagccccaagctctttgccgagcgcagcatacattcccagtgattgattccggtaacgcggttcagtcgtgatgacatattcccgccagccgttttccccgagtgccgcaacctgcgggctattgattacgccgcctgtcgcataccctctgtacggcccgccgtgcgccattgataccaagccgggatgtttcatgatgccgccgtatctgctgttcagatagttaatagacgctagaatttgatcaaccggatttttaatatttccgtgtcctggttctttatgggcgttaaaggtgcttgggatgaactgcattaacccctgtgacgggtggccggcttttgcattggaatcccaattgttaacaacattggggtttccgccggattctttcattgcgattgtttcgagtgctccggcatatttagggcccaatcctttaatattcagagcttgagcaacccattttttcaccgctttgcttccgccgcccgagaaactttcagcataactggacaacttacccttcacaaagcccacggccttatccttgatgaatgtaaaagcgccttttgctacatcaccaaaggccccgcccatagtaggcgctgacacacccaactgtttcagaactttattaagcagctttgatggatgacctacataatcaaatacatctaatgcaatatctttcgccttgctaacaacatgttttacgccttccactgctgaggttgctttatctttaacccatccaagcgcacccgaaataccaccgccgacattccccttactgtaagcaggaagggccgctaatgcagctcttgtctgtttcgcagaaagaacctccgttccttttggaaggttcatcatggtatccctcgctgggctcaagcccatttgtccggatggtgttcgataaagctcagggcccgcatttgatcctgtgccatccccaagaatggccgggcctcccggatgggagcctgtaccttgtgcgtattttggcactttgaaatgcgccggcttccattcaggaattgtaggcacaccgaccttctcaaggacccagttcactccgccgattactccgtttactgcatcagccattttatcggtcattgagttgctgagcgagataattccactcaaagcatgttttgccatgctcttgattccgtcacccattttgcccggtaacgccttggctccctcgactatatcagaaaatttgtctgtgactttcttccatagactgtgagccagatcaccaaccttatctctaatataatgccatcctttgataattccatctgctgaattggatactaattttgtaaccattccgaccgcgctagaaaatatctgtttcacgccgtcccacatcatactgaaattcccagtgaaaagacccttgaagattttcacaatccccattattatccctatcgctccgttgataatggcaatgatgttagtaagggcagtctgcacaataataagcactactggaaaaactgcatttatgatgttcaggataaaacgaattgctggaattacaacagtggtgatgatatttgccaaggcttgcagtagtgaaacgacaataggtagcaccatctgaatgatctgcacaatttgcggaaagacctgctggactacctgaattaaaattggtaaagccgcctgcgcaagctgcaaaataatatttgctgctaaagtaagaagctgggcgacaaccgggaggaccgccagaatgacctgccctatgatcggaaacacctgctgcaccgccgttaaaatcaacggcaaaatttgaatggcaatttgtccgatcgttgatccgagtaattgaatcagttgaaccacaatcggcagagcctgctgaatgatattcataatcaaaggaaagaccatctgaattgtctgaaccaggataggcagaacagtctggatgatcgtaacgataacccctgaaaaactgctgactaattgaatgatgataggtaagaccgcatttatcacgctgagaataaccggaaaaacagtctgaaatccttgaacaagtaacggcaaaatcgaactgacaatttgcaatacactcgtcattaattgccctgatacctgcatccatgcagttaatagctgctggatcaatggaatcaattgtgggccaatcgttgaaagtgtttgtgaaacggctgcggctaaaagaaccagatttcctgcaagctgaatgaacgtctgttgcatttggccggctaattgctgaaattgcggtgtcagttgtgctaccagttgaccgaaaacctgttgtactgtcgtgataatcggctgaatggccgtgaataccgttgtcagcacagattgaacagtcgtccacgccgaatgaattgcactgctgaccacttggtttgcatctttcagacgatacaaatatcccgcaaaactgaggatcgccccaattgctattcctatcggtccggatactcccaagaaagaaagaccaatcgacgcaataataggagcaattattgacacaatcccttgaaagcttgataaaccgatcttgagttgatttatgaagcctttaaaaaagctgttcaacccttcggttaatccctttccgaaaaagtcagtcactcgttttcctgcattctgaacaaatgaggaaacagtatcaacagccgttttgtaagcagcctcaattccggcgactaaatgagggtgtgactcgcccaaccgatcccataattttaaagattcggcttgcatcttatgaattgcggatacagcaaccttttgtgaatcctcgaatcctttcataaatgcaggtttaagcccctgcacctctttaatcatggtatggaaggcactgactaccgcagtttttccggtatccgcaaagcgcttcatggcatctgtagccggtttgaatcgctcttgaagcttgtcaaaattcttgtaaagcatataaacgcctgttacaagcaagacaattgagcctgcgactacatagactgttccggacatggcagcaagccccgttactaccgggccaatgaacatccaaagactgctcagagccccgagaaacccattaaataaccccactcctattgccaaaggcgataaaagcagggttaaaacagggatgagcaataaaaatccttggatcattttcgccaccactggatgagctttattgaactgaatgatcatctttccgattgcggtaacgcctttataaattgacatggccacggttccgaatacttcaagggctggctgaattgcttttaaaagagtgctgcacatctgttcccaagcctttgaataaccgggaacggtctgtgtggctgccttatgcaacccttggaataggaaaaagtttgtgaaggccgcgccaagcgctaccatctgaaaacgcatatacccctgtgttatcatggctgtcatatcttgaagctgtttcatatttgcggtaggcccgagcatcttcaaggccaaatgtgccgcagttccctgcttcgccatattttcaagggtatttgagacggcaagccccgctttgttgacttggtataacgggttcgccatcctgtcataattggcagcgatcttttccgattgggttgacattgccataatcgttccgatggactgcaacatgctcatgcgcatcattttattattcttgatcatgttgtcagtaaccgctttatgctcccggcctagcctgtacacttcatccatgaactgttcatttgtcccggtccagttgtccatttcttggcctaactgaaagaagccatatcttgcccgtatcagctcattacggaaaccgttcattccgtatctttcctcattccaagcccgtcgcatttcattaaccatttgaattgtatccgcttcaagtccgcgtgttgagccgcgcaaaaagtccatttcccgcccataataacgcatacccctgtaatcaggtgcaggcatgtccgccgcgctttgtgatgatcccccgttaacccggcgcatgtccacattatgcaaattgtttcgcagcctatcaacttgatcatttgcattgttcaatgatgattggtcaacgtcgatgctcacgcgtgacggtatattttgcactaatctgttcgtttgttgaatggtccggtttaggctttccacatgagacgtcataaggtcaaatgcggggccgagattctcaattgtccgcgcagcagtttgtaaagaagaactgtccagaatcatactcatgttcctgaatcttcgctgctccctgtgcatattggacatttgcgttcgcatttgagaaaaatggccggccgcattatctgtatgttcaacaagtctatcaatctgacgattcgctcgttcaagaggggaggtgtcaacgtttaattccacatcaatatgcgtgctccgcaaagcatctgtcaacgtttaaccccccttatttctttttgtttcgtttgttttcttcggccaggtgaatgtccaaagccgcattggcttcgagtaacgtatcaaggtccatagctgcaacctccgtgaaagaaaacttctcagacatcacaagccgatacataggccagttgtcactcgccctctttttgtaaaactgctttggtttcgacggtttcatcgctaagaaaggtagaaacctcatacattaattcattgaatccagcatgttcatcgaaatattcgaagtttacttttggatttaccacaacttctttcatgtacagctcatacaattgtgaagaagttgggcggcctgtgttaatgttaattgcttcatcttgaatttctaccatccgtcttgttcctgggtgctgaagagtgtactcgattccttggattttaactgttttttgtttaccgaattttgacataggttttccctccgattgtttggtttgcatatattgaaaagcagcccgagtggactgcttttttgcatttgatttttttcttttcgacatgattaataccttactgctctaaaactgtataatcgaaaacttgaatttcaaattcacgatccccgatttcgtcactgaattctgcatcagcaggctttttcaccatggcttcagtgccgccgattttctcttgtccgccagtaacccagatcggaaaggttttggccgtgtttgccaatccatttaaataaggcacaaacggcgaacccatggaaagagtaagcgtaattgtgcctaacggattgttttttgttgcaacgctcacatcacctttagcgctgacttttgttgaaaacttttcttcgtctttagcacacgaaaccatggtaccctctgaataaccagtaacgattttcccgtctatattcgtgttgacctcgttcgcatcgtaaacataagcagccattgactattctccccctttagattgaaatttcgcctgtaattgaggcggaatgaaccgcgccggctaattcgaacgtgaaagaaaggccgtcatacacgcgattttttctgttctcgtctgatacttcagagcgtttttttgtgctgatggtgtaaacgggcaaaccatcttcatcagaagcgacaatcccatttgaaaaggctttttgaagtacattcgtaacctgaacactcaacaatgaaaaaccggcattcgagaacgggattttaccgttatttgagaatgccgattgaatggatgtttcaatatttaatttcacccagtccttgccgtgcaggacgtcaatgtactcacctgaagcagtaatgccctctgacgtctcgctgtggcctgctttggtcacataagcgatagctccctctttgtggagcttttgcagctcgtccgctttcaggtcttgcggggtgactcccacaatgtttttgaacttccaagtaactgaacccactgtcaaggagccgacggcaccaaccagtccggcgtctggatgctcgcttgttatcgggtgataaaaaacgattgtccggtccttcccggtataggaagtgacttcttcccgatctgttacttgcagaacaaggaatttgtatgatttttcttccatcgcttttgctgcttccagcttctcgtctgccgtcgcatcagcaagaatgaggaagtgccaatcattatcaaaatactcgtcaaaagcattccgaatcgtaaatgtggcagctgctcccgctccgtcgctttccccgttttccgggttacctccgtaagtaccgatggctacttttgatggagcattgtcgccctgtgcataaatagcagcagcctttttatatgcgggtgttccttctgggtaatccgctttgacagcttctattgagccatattctttataggtgttgtgtccggcaaccttcgcaagaattaggggtgttcctaaccctttaagattcgacggtttcactaggtcgattttgaccgttacatcactaagtggcatgtgtttaacctcctatggtttctatttgcgcggaatcaaaaaactccgcttgtgtctcgccataagccgctcgcgttctaagacgcatatcaaagccgtgacggcgttctgtgtctatcgtgataaatgtatcccgattaccgaaaccgtcgtttctcacccacgccaagccgttgtcatgaagcgtctggcgcgcgtcagcagttttgaagtaagaggctgtttcttgagcaagagaaatgacttcaatgtgactatttgaaatccatgtaaaagaaaaaaccagctcaatgtcttccgttaacactccttgttcctcaacacccctgtgttgcggcaaatacggagaagtaacggtatacgtgcaaaaagggtattcaggctgtttacctgtcccgtttgcttcgataacgacatggccggttttctctttaatcattctgagaaccgttctgattatgctgttgtaatccatctgaattgctcaccgcctttaagatataggaattgaaatcggcgtatgtcccgtatggcgtcattgcttccaccaaaaaggttactccatcaaaaaccacttgagccttgaaagggattttcttctggaagtacagttgcctgtccatctgcgtaagccgtccgccagattgataaattaattgcgcctgtaatgggacaatagcgcctttttcttccgattccaccggcttgccctctacccattttccgagatcgtcataaaacccctcagacgccgggagcaacaatgtaaaatcaacgctgtatttctcaatcagatcaccgaactgaaagtgatttttcattagctttcaacctcgtaatccatagaaccgatcatttccccggtatctactaacggatttgaagagccttttccctccgttgtaaaaggatgattggcagggctccgtaagtctcttgcatacgtctgcagccggccctttgccaacaatccgaccgcgttcatgatgtcattaatagaatcgccgttctctatggctctgttgaccagttcctctaccttttgtacaatctcggcttcattttcatcccaaccagcccttaagaatgaccgttcagggatattaataaactgtgtatccttcttgagataaagacctttggcagcaagataattccgcatgcgatcagttacagcaatacggcagccgaattcatgaacagccgcgatcatttggcggtcgccgtccagaacaccgactttcattttcccttttgactcaaggttcctcagtaattccggtatacggtttgtatcccgcacccggatatttcggcgccccatctgatcacctcaatggtttaaaacgaatttttttgtatggccggaaaagatcaaacgcgggtttataccttacgtcatccgccgtgtatgtcttgctcattccgccaattgattcagcttggacgcctttcgggctatcccggtctatttcaatcatgagggcaattccttttttcacggggcccggtaataattcaactccatccggccccacaaaagagttattgcaatcctccttaacaaaagaaattgcgtcttcaaggtcaatttgtagctttgcatcctgcgaggtgtcatcctcggggattcccaatcgtatttttaattctgacaggtccatttctctcagccctttcaaagcacgggttcatatgtcgcgaagcacctgcaatttatatcatttgaaggatctccgctttgtcccggtgccggcgccctcacagacttgccgtttttatcttgaccgagatcaaacagctcatttacaaacctggcctggccttctaaatgaacatgatccgcgtttcttccctcacgaacccgctcgtcacccatgttgtgccatatctttttcatggcaataccattggaatcagctttcgtagctgcgtccagtgtagctttctcccgcactcgatgcatttctgttctgacaatgcgctgcgcgcggttataactgacacccacatcagcttgcagttccttcgctacctgaacaaagcgtttccgctcaataaagccgcgttcaatcgtatgattgatcttctgaactgtctttttacggtccgtttcgattgctttgagcatattttcacttgtgatagtctgcgagattgacgcgggcgccgcccatgcgacaggcaatttccctttcgatgaacgggacaatttaaagccgacggccgataagataccaagcatgagccagttatacgatgactcataggtttcagtcagaaaatcaagaacagccgttttaacctttgcagaaagggcagtaatcaatgatgctatatccttcttaatctgagaaagatcattactccgattcgcgtcagcaaggctgatttcgcgccctttatcaagcttgacaaacagggcagtcaacttggaaagtattttttcggaagtaccacgaaaaagccgcttcagcttccgtaaaaactcctgcatcttacgggttaacggcttcaaaagctctttttcagtttgttctttatccaccgctatccctcctattcgtcagatgctttttcaccagcgtcagcagattcttgattctcttcatctgttgttttgtccgctgcctttttgctgtttttttcagcttttttaatgggcgactgtacttttttgtatctgtcctctttcaaaagcttattaccgtgttcatcctcaacaaaccaagttgaaccggtatcagtattttgaatccacataaaaaagcccctcctattgtggacgggctgcgcttaataccgcgagcgcttccggtcttgttactttggcgccgtacaagtgaagcccttttactgcatcagcaaaacgtttctcagggcgatacgcctcgacttgggttgcttggtctgcataagaccacgccatgccatgaccagcaataatcttatgattttctgtgccaccctctggtttagatagtggagcattgtttgattttaataccgtgaatccggccgcttgtccgataacaccatttaaaaggcgttgttctgaagacatgttcccagcctttacaaaacggtcatcttttagcattaatccttcataccaaggcgttacaactacccagcgtccctgttccggcacgtctgcttcatccaatttcaccgaaagatcaaccagatattcgtacgcgtcgttttttgttggtgaaacaacttttgtatcgctgccgatcgtatgagctgcatccacataatgagaagcaatatatgaatcagcagtatttttcagagcgtatgctgcctcttgcatagccgcgtccatcaactttggattttgttgaattttatcaacgtcatcaatctgaaagttgaaatattttgactggtcaatgagaagcttacggcttgtagaatcaagtgtttgcgcgttatccatgtcttgatttttagtgtagtcgcccacactaacgcgccccatattgttgattgtcacagagtcaccagcagcagtgatttctccctcgtaatctctgttaatgactcccgtttgaccataaaccaaagttctttgtaaattgctcagcagtcttgcactccataataccggaataaaattatctaatgccatgtgtttttatcctcctattgattcttataaagagcttggatgcgatcccagttttgattgacttcctcggtactcatctttttaatgtcttcttctgttaacggggctgatgctccgcctgatggtgtcggcgtgctaccgttctttttgaaatgatcgtttacgatgctttgttcaaaagtcttgaaggcttcggccaaggtattcaaattttgttctgtggtcgcatcgtcctgaccgataaaaaagtcaacaagattagtaggcaagcccttttccgttgcaattgaaagggccgtatttctcaacgactcccgcgttttctcttgctcaaggttctggaatttttcctgcaactcacgtaattgcttttgttcctctgtttcaggaggaaaccgctttgaaatctcttcctcaagtttcttgggcaacgtatttttctcatacgtcttgatcgcctctgtcacccttgcatcagatgttgattgaagcagcttctttccctcatcatttgtttctaggaaagcccgtactgcatccagcgagagttctccgccgctcggctgcggtgccggatcggtaccggttccagctgctggctgggcccccggtgttggatcagccgcgcccccaggttcggaaaaatgctgaaggttaatgcgcagtggcagcctttcttttttcatgaaattcattgacggactgactgacttatccgtgtttaatcgtttcatttctgtgtgtcctccttgcccttatcagttgccgaagcccctaacaagttcaaaagtatttcggttgctctttaacgcctacaacgcgaaaaaaaggcataaaaaaaagccactcaaaagagtagctttctgctcaattagtcagaaacgttatccttcttcctgtttagaaacagagactttttcacttcagcatatatttcttctgattcatgtagcaggttttcgttttccagcatcctcaacaaagaattaatcctcaactcttcattcagatggctgtttttttctttcgtccttttgaaaagcttcatcatcctcattcgcctcctgttcctcgtcttcatcctgattatcatcaatggtgtaagcatctgcttccgctctcattctttcaatctcaaaacgcacatcatcaatgaacgatagtagagcaagccgcgtttcttcgcttaccagtcctttgagttccgcagatgcttgagcctcttcgagaatgttcgcaggaagattccgcttgaattgaaaccatagtttcagatacgcgtctttgccggccagtatccttttggaccatgccgagcagagtattttatactgataccggaatgccgcggtcattttgcgttccatagtaattgccttgtgttccagcgccataagcttataccgcatggcaacgcctgtaatagtgcccccgaaagagccgtcagaaaaattgactgtcttcgcaaaacgcaaaatattttcttccagccggttcaaatgattttcgatcatggcgtcgtttatttccttggttaaaaatttcacgtcgccgttatcgtcgaagacttcaaacacgccattctttttcaacttttccatatcctcatcatcgagtgaagccccttttacaatcaagtatgcaagccgaaactgttcgatttcgttcgatgcgtcagacaaagttctgtcatatgcatcaattaaagaaatgactttttcagtgtcgcctttcatttctttattgttcggaacaccaaacaacgggcatccattgaaaagatggggcttcgtctcaataagatcgtacttcgctttatcagacgacttaaacgaataaatgaacgtttcatcgtagaaatcagcccgatatgactcgacttttttgccgctcacccactcaaacactgaataatagcgcaaagcatatgtgggctctgttatatcgtctaaagcgagaataatgcattcccacggatcaacgtttcgcaggcattcgtttccgtcttcattaacaaacagcaggcgggcgccgtaaccgcagatggaagccattttcccgagttcggaatcggcgtcctcaatgttatttctcgtattgaaaatactcacttggtctttcaattgcttatcttcagtttcataagaaatggggtgtccaaacatatagcctgtcttagtatcaatgatttcagagtcaaatgagttgttcagcttattgtttaccttgtcatcaatacgttgcaccttatcggttcccgcgcttccataatcaatgatggaccgtgttaatatgggaacgccggccggatcagccttatatcttgcatatagcttcatcaatttttcacgaacagggacgtgttcattaatcatcatcttgataatgtcaccgttgattccactctggcgaattagatttatatattccttcattggtcactccccctttctgtgtttcggcttgttgtgggtatacagagcgtaccggagagcatccagcacgtcgtcccattccttcacagggtcgccggtcttgggattccatacatacatgaaaatttcttttttgaagcgctcaaccttgtctttcacgacgaataactcatttcgtttaaacagccgggccacttcttcaataccggatatgatcgccttatcggcgttcagggctcgcaacttctcccgcctaaagcgctgcacatgctctggccgcgcagaatcgcagtagaaattaatattgccgtaccgctcctttacgcctttcgctactttcacccagtagtcaatttcctcatgctgcttggcatgttcttcgagcaaataaaaacacccttggtcatcttgcccgattacgacaatagaacccgggtgctcatatccccagtcaacgccggcgaaatacttcttgaagttgacgcgcctgttctccaattcctcagaactgatatagtgaatgtccttattgaagtcccggtaaatgactccttcagacgccacccaataaccgtttatatctcgatcggtaaacatgccgctgggcgtcgatgccacgatactctccacatattccggatcaagaaaattgttatcgaacagcgagaaatgaaatgaccggatgttcagccggccgctcttcaacttttgcccgtctttgtcgatataatcggttttaacggtgtgcatcgggttttcggggtttgtatccatcatgaccacagcgcctttataagagcaccgggaaatgacttcttttacaaatgaatcatgcagggcggtcgcctcattcagaaacgcgccggctgacgtgaacccccgcgcctttttccatgaatttgcgtttgctccgtcaaagcaatatacctgattaccgaatatctcaacggcgctcgacttattgagtttcaattccttgccgagaatctgttctaaatcattcagaacgttccgcctgatagtccccaggttcgccccgccaataacaaaattcaatcccatgttttgatacttgctgacgtgagcaagaaacgccaataggagcacgaatgtttttcctgccctctttgcgccgctacaaattaaaattttgggctgctcttttatgaagctgtcccaaacttccttttgctttttattcagttccatcggcatccaccatttttcttaacattgtagcaatctcattttctttggtgttttcgtcgccgccgttaatagccttcttggtcttctcgatattcaagcgcatttgttccaatttaaggcgccgctcatcttgctcatgcgccagctggtcaaattgcttgatcaagctccggagctcccccattgcccgagattgagcattcaggaatgccgcctgcttatcccatgcgaattgtatatcgtgctgcagctcttccacaaagtgagcttttgaaagactgccgtcctcatttatgctgaggtcaccttttattttagagacaattttcgtagtgtcgtttttatcctgcacaaacataatgcgttgtgcccgcagaatggccgcgtattgaatctgaatttgatcccatatcatatcagcaggggaacgctcctgaatctcttccatgatttcaagcgtttcttctggcagatactttgagaaaaacccatgcgaaaccgcgtttcgatttctctccggggcgccgccgttgttccccaatgcatttttattaccgggtggggcgcctgctttttttgtgtgcacacttttttcagagggtgcacccttttttcgttcccaaccatgccgctgcttccatgatttaatggtgttcactgacaccccgtacttttcggcaaggtccttgtatttcatgcctttggcgtaatccttatacgcctgaatgtgcttttcagccatctacatccaccgccgcctccttttgaattgagttgttttggaaaaagatattctctctaaaccgacgccgcactcagaccgttaaccgccaatagtttttctgagatttaccggaatcggtttacagagaacataaaaaagcgcccccaaaaggaaagcgctacatgcttgttttatttattcttcagatacaaaatgctcaggaacaggttctctcttcagatttccccaaggagttactaacttttggtcacgtacatcgtctgacatgatagtcactatttcatatttttttactttatccagattttgttttccaatttcgaacaaccactcatgaatattaatatttcgtagattacatggtccatttgcttgtgctacatacgaaacccggacttccaataaataacggccgtccttttttaaataaaccccatcataggagcttaatcgatcactaatttcatattcaacacttgaagtcattttgtcacccctcccctaccaaattataggtgataacaagggacaaaggaacaatctgcaaaatttgtcgaacgaaagcgtccttcataaataggtggcattcacattacaaaaaattcaaaaggtgattattttttaataataattattttttttgatgtatcgcaaacttcatgaattttaatatcactataattatttaagttcaagaaaccatattctttttcattcaacgctgctaattccttcgaatgttttttctttttttcaatgcactcattaataagcacttcaataaggttaaactttgctgatcttccttttgtagtaaactcgattacctggtaaaaagcaaaaattaaaataaaaaaggtacaaatggcataaacgagaactgaatataaatctggacttatccttagaatggtagtgtctttagtaattgaatcaatcattgcatttgatattgttactgtcaccgtacaaacggataacaaaatagtaaaaggtatactgatcaaacttcttatatcgccctcaacttttctatttgcttttaaacgattagacatttcaataagttgatcaagagaatggtcattcgtaactttctgtttgaatttatcctgttttccgttattttttttatatgcctttccgtaatttctttgcaaataaacagttacactttttgcttttttatattctatttttcttctccagaaaaaaatgtacttgctaatcatactccatttcataatcatcacctatgaagtgtatcggcaaacaagagtcattttttagaaacaaataaaaagctctatacgaaataagagctttttgttcactatatgaaattggtggggacgcaggaatatttcgcctccccgtcctgccttccagtttacactgcggattttatctgattcaacaattgcaaaagctgacacgtttcgcacatttggcacaaatggcacacaatatcatttttaatgcgtctgactgtttcgcgggaaacaccaagatgcagcgcgatttcacgaaacttcatcccttctaacatgcaatcaaagacaatccggtttttttcgtcttctatttcttcagtagagcgctcaagaaaatcaacgatagtttcgtatttacggagccgcttttcccgacgattcatctgacgtaattccgcctggcttattccggctgatcctctcggcattcctgcttcgtcaccgtaagtagccacaagcttctgcccggcaaactccaccttgttgagaatgcggctcaatcgactgatctcccgcagcataaaattataatcacgaatccattcttcgatttcccaagccatcatttgatcagacattataaactctccttttgtccgtaaatagaatatttctcattccaaccgttctttttttgttctgccagatattcggttttagatacttcctgaattgttaggctgcacttttccatcaagaaacttttcatattctcgaataaatcttcttttccgcacaaaagattcacgattttcccattttgattggcgaatccatacttcacaccaaacactccctttatttgcgtctcaaagcgccacccttgcctcttttcagagtttgcatattttgtcccatcatccgctgccaaaagcgatctgatcgctcagaaacgtttttatctggctcctttttcttccgcttcatgtcatccctcctgataacaaaaaacggacaccaaccagagcgcagaaaaaattcttgtgcaatgatcagtgtccgcaggctttccgtcttggacgtatttatttttaagctctctggctgcgtaatgccagcaggctcatttttaactcttcatatgcttatattttaccataatccgggttcaatagggttaccaaatcattaaaggccggctttctctttatattgctcccaaaagccgttcacttcatccaagtaccttgtggcctcggagcttttggtttcagcctcttctcgaattgcgtcaaaagcctcttcgaattcatcggcaggcgtctttaatatctgatattcgttggtagcgagggcagttgcaagagcgacaggatcaagacggtttaacggggcccattctccctgccaattccctaagctaacgcttttccgtaagctctcaaaagccgcagcctgttcttttgttaattgtagcattgtattttcctccgattcttctttgaatttatcttacttcacaatgaattttgccgattcaaatgttccgatgtagttccgcttgccagaatcagagtagcagtccagctggatacattagttagtcgaaacaaaaaacggacaccaaacaaacagcattaaagctggaagttcagtgtccgcaggctttccgtctaagacccatttaattaaaaataaaaaaagatgtagaaatcaaagtataaaaaatcatgattaacaaagaataaaaaataaattttaaagagagattaacgcgtctagctttgttttctcttattaatgaaacactcctcaattcagtaagtagaattgacgtaatatcttcaatgcttaaattattaaacctatttctgaaatcatttgctttttcgttgtgtattaatttggttgaatcagcaaataaattataaatagttgatcttggttttatacttgcaataaagaatatgtttttctgacgatcagacaaaactgtatcttcactttcaaagtatctaggtacaattgcttttagagacaacgttacagataataacataaatataatcccgcaaaaaaataaaaatattaaaccggaatgtatggttgaagaaaaatgcgaatgctcagttatcttaaataaccttttgttaaaatcaattattttttcatttatcgcaccaatataggctaaaattattccgactagaaccaaaactgaagcagctttcgtatctaaaaacctaattgtattttgcgtatcttccaatgctttatataaaaaatcaagctttgtttgttcagttgcttgctcggtatccaaaaataaaccctactttctatttatcatgtatccattataatcattgttcaactttatttgagagaaagatattcttccgtttttacttgatggccataggtctttaacctttttacttagtaagacggaccctccttccccgctagataatttactagcatcatttatacagctcccgaaagctttaacatcataagtttcattagtaccaatctttgttactattacatcaccataatcaattccaatcccacatttaaactcccacagtatgttatcattctttattaaggggttaacaatctgatccagcgcttcttgtatcttcaaaccacacaatcccgcattttgagctgaaattgctctggcttccccagaaaaacgccctccaaaaaaggccataactccatcgccagtaaaatcaagaacaacacccttatattgttctattatgtatgctacagccggataaaaagcatgataggatagaaaagtattattaggtcctaatttcttagctctttttgttgaatttctaatatcaacaaacatcacgctaaaattgtcgcggtcataagagccaaaattaagtttctttgaatcataaccaggcactgcatctgagattgcagaatttgcttcgtagtgaacttttttaagttcaacactttttttcgcagctgcatagttcttcttaacaattccttctgcttcgagcaaaattttgtccaaaatatcactaccttgtaggtcttttacattattgtacaactattcaagacttttaaaaactccttttctatttttttgttttttaaaacccagtaaaacgagttaattctgtttactacttttatgttaaattatttctttttgtctaaatacttatcgatatctttaaagtaagccgcagccgtaaatgaaatgattgccccgatcaaagccatgttccccttcatatccgccctatattcgtcctggaaataaaaccagaatcctaaccccatcatcataaaaactattctcagcgccatcgaatcccccttatttaatttgaaatttagccgattcaaatgttccgatatagttcctcttgccggaatcagaatagcagtccagctgaatgacataggttccctttccggtcttattccggatcgttttcacgttgaatgatttcagaggcgttgccgttttgaagctgccccgctgtactaagttcgtatcagtcagcccgccgccgcttcgcttcttgtatacgccggccgtgtaataaagtgtgcttgatccttttttctcggctttccagtccaccgttgaggcgccggccgtgtaagtcgcggcatccgtaaacacccggccgctgtacccagattcattttgccagcctgaccatgctgcggaagcagacggcgcaaccgccaccgctcccgtaagtaatgcagctgatagaatgattgatttgaatagttttttcatgactgttcccctttcttcatataacaagcccttctttgttcacaaataattaacatttatttacaaggaaaataattactttctggtgtatatattatgagcaacacaaaaaacttgagaaggagtgtttcaaaatgaatttcaaaaaaacgttggtttctgctttaacagtatcagcattagctttggcggttagtggtgcagcctctgcaaaagaagtacagatttctccaagtaatacagtggaaagcgttgcgactgtttccggtcctatcaaagtacaagactattcagttgatgtggcagtaggtaaaactgtaagtgtagctaatccagtagctgaaacttactcttctgatgctagtggaatagccaaagtagataaatatggtgttgttactggtgttagtaaagggactgcccacattactttatttaagtctgatagatcaatactcggagtcgtaactgtaaatgtaaaataatctttttaatatttccaaccatcaagaagggccaaatattggctcttcttttggttagaataaccttttgcctcttcaccttactctcccatttatccacacaaatttcctcctcagcgcccatgacgcgcccgcaatgcgggcaacaggcatctgcgcggatttctaaatcaaatttggtgtaatcgcagtccgggcaatggtattcgatcatttactatccgcccattcatcaaagctgtaggggtaatcaacactttcaatgaaaccgatctccttcgccttctgacggattttcatacaaccttcatagctgtaagcccatatttctttataatccctcagctcgccgtatttccctgttatgatgaattttctaaagctgttgaccagttgccacatgttgcctccatgcgaaaagccgtttgcacgcccatatcccaattcatacgggtaaacatcactcccagtgtaatcatcaacgaagaacagttttttcttaaacctgaaatacgctatccgattctttgacttacagtagaaaatacatctatcaatacttgcgataagcttgatcaaatcgtttatgtcgttcattcgtttcaattgctctgctgttgccatgagattccctcctaattagcctttagccttgtaaacttggtcatatgttcacttattcatggttttgtatatgaatttcccttaaacgccacacatgccctcacattcattcaaaaagtgatctatatcaagctgatcctcattgaaatttacttcctccaatggccggcctgacttatggagaaaagcattatttttaaatcgcggcagctttcggataagccggtcaatttccactgcgtcttgccaggaggacgggtctttcatcttcatatcacgccaggcgttgaagtcatggaaagggcagccgatgcagctggactttgccggcgttccgagtccctcacgctcaacgtatgtaatgcagcgcgaccgatctatgaaggccacatcaaccaaaggatgctctgcaacttgccagctttccctgcttggtttaactcgctggatttcatcagtgctgatccctttccagaggtgaacaacttctttgatgcgctgcctcggcttgtacccgagcaatgaacggattttccggttaaccggtaatattttgtattcgtttgtacattgccgacgggcgatgcctatttcaccttttgaatcccgcgtgaagaatgggatactggcgaaacggtcacctgtctcagcgccttgcacaatgtcatcacgaatgttcccattatcagtgaagatgatctcccgcccgtaagttgccttgatatgctcgtttattttctcgatccagttgtaaacgtgttgcggctcccatccggtatccgagaaaataatgtaatcgggtataacgccgtttatctcacctttcaacgccatgagaagaagggccgttgattgtgtgcctcccccgtaggagaggacgtgaatatgttttttgccatcgtcgtactgctgtttaatcatcccttaacccccgatcaaattcggcagcacggagatagcgaagaagatgagccccacgcatgccccgaccagccagatatttgttttatcccgtttagcgataatggtatcgccgatcattttcagatcgtcagaccgagcgacaagcgtcgggatgtagtccgggtgaaccttcaaaagctcggccgcctgctcgacggtcattgcttcgtccttcgtggccttcacgttccgttgtagttctacttgtaatggcatcatttttcttccccccttatatgactgaagccgatactaaaactgtctcctcgacgcttatggtcgctgcttttctgtgaaatgtctcaccatctataacaattgatgtttttcttgcttcctcgtataacgacgggaatttttcaacagatgattcaggaacaagcccccatactttccattcatccattgagttctcaagatcctcagcctcgcaataatgcccctcccgaaattcctggtctaaccattcgtctaattctaaggaattttcaaatatataggcttcgtcacattcatgttcatgaaaaacaaagaaatattcgaaaaaagcgccagtaccgtttgacttaacaaaatcaacaaattcccgccagttacttttcaaaccaccttgatcaacatatttcactttcattccgcgtcacctacaatctgaagttttttataatgagctacatgtccgcagggattttcccaagtatgaacttgtccgaagaatccgtcctcagcgtgctgcgtgagctgaggatttcccatttccccgccacaagtagggcattcccaaagtacattaacttccttgaacccgatcaggaaatcattggtatcgcgggcgggaatcgttactttttttgtcttcattccgcagccccctttggtgtaaatgctttgatcactttcaaaatataagctgtttccccgttatctaatccatccatagcgcactcaaaatcttttcccgcgcttttcattgtgccgtggaactgtacatcttcgctttgcgtgtcatataccatataagtatcattcattccgctttcttctttctgttcctcaacttttgattttaattcttggttctccgcctgcagcaacttaatatcttcctgcgcctgccgaaactggtttaccgtgacttcctgctggcgctggtgttcctcaatgattgcctgctgttttctcatgtagccgatcattatgtctttgacataactctgctcgatgatgtaacaaggtcctgcatttatatcgagtggcttcaattcctcttttgaagctaaatgccacaatgacaagtcacttataatttcctgtaatttatccatgcccgttcctcccccgcaggggaaacccctgctatttgaatttgtggccgatctcgtaatcacaacgagccaggccgccttttattgtttgaatgattgttttaccgtgttccggggcgtccattaagtgggctgtcccttcagtgccatctaaaacaatgatgcggactttccccggctcgatgctttgctgaatagttgtttcatgattttttatttctgttggcttgttcactctggccgccccctgtgctatgatagaagtaccagttcatatcagagcatcggggccacggcttcggtgcttttttacgttttacgacggcagccgcatcgttaagccggcagatggctttaattcctcgcggtagatgatcggatgcttttcgacgtatgccgccaactgctccggcgtcattttccactccttaactggaccaggcttgtatggatcgattttttcttgcatagcgataacctcctgaattgatttagttttcaagcatcaaactttggcctcaaagcgttatggcaggatttccgttatcatgacttccacccggggctcttcactgtaaaacttgctaactttcagatcgactacctggctatcatcccggtaaatcagatgattcagcgcgtctttaactccctttacatagttatcaacgtccggctttgttacggggcgcagcaggcccttttccgcattctctctttttgtcttggatttagaaatttctttcgtcattggtctgaatactctgacatccattgccacaggtcccgtaataacttgttttggacgatactgtgacgccaccagcgcaacatattgtttaaagttctttgatttcaaaggatcacgcattttaaccttgccatttataacagatcccctcggcctcccctgtgcaacaggctcgccgtaaactataaactgaatggaatccaaccgtcattacctcccgtcaatttgttcccagtgctgaatctgcttttccttgtacggcgctgtgaggatgatggccggcagcaggataaccgctttaagcactgtgcatcagctccatttgtttgattttttcctcaagcacccggatcgccggggtaaggtcctggccggccgtttgctcggcgggcccgaacagatacatgccgccggatgccgtgaaatttacctgtttatccatttctcaatcccgccaatctatgatttaacagcattctgtctcccttgatgatcacaacataatccgcacacatttcgtaaatccgggtgccgagcgcctcgtctatctttacgatctgctcgatattcaactcgcttgaaatcaagatcggtttatggttcagatagcgatagttgataacagagtatgtttgctcgacctgccaatcggtagcccgtggcttcccattcagaggcttgaacagatcatctataaacaggacttcaacctctttcattcgcttgagcttttcttccagcttgtcaaaatcatctttcagatcgttgaatccttcgacgtatggaaaatactgaaccgcgatattttttgatttaatcagcttgttagatattgcagtaagcagatgtgttttgcctgcccccggctgcccgagcagggcgatgctgttgtttcgagtaccgcgtatgttatcaaactccttgtagtattcgaccgctgtatcgtaagtcactttcaccatttccggcttcccttcggttacaaaattcttgaattgcaacctttcaaattctggggtgatgtcactggaattcattaatttccggatgcggcgccgctcaatgcatccacaccgtacccacacttgataaccgtccttgttttcgagatagccgagttcgtctttgcatacctgacagtcatactcagccttttcttctgaggcggccgacttgtccgccgaaaattgagccgacctttcctgaagttctttcatgactgccgccatcgcctcgtccgtactttgtgttctgttgtttgttggcatactgctgtttctcctttcgtctctggctgaatgggtttgagaggattgcttcaatataatttagattgacgttgtttcccttgcttctgaaagcctgtttcatcgcctccatgactttctcttcgccgtaatcatccaccatatacccaagccgctgaacctccatcgtgccaatggtgcgggctgttttgttttcgaatagttcaaatgcgtttttcattttttcgtcaacctcctgctgtcctaaaggtattggagccgggtctatcttcttgttgtaatttccaagctgtatgtactcggcataattcaacaccgtcacaatgaaaccacgtttttgcggcagccgatccagcttcaaatactcttgctttaccatccgatctaacgagtatttgatctgatcagaagaccagttgaagcgcctggctaaatctacaagcttaatgattgtctgcccgagctttagttcttgatctgccctgtactccgcccgtttgaataaataatcgtatattgtctcgtctcgtgaatctttaaatggcagccggggcaggaccacataccccaaaccttgcatatccatgccgctcacctacttcctttcacacagtgctgtcagagccttgaaatctatttctactaatctcagagacggctcatttgtctttaagtagtcagtcgtgtaccgggtatacaagtcctttctcatgtcgcactgaaccgttttgaccagccaaagataacaatgcgggataggaatcctgatcagctcccttttcatcagctcaccaactccgaaaaatggatgatactgttcagttgattagtggcccggcaatacttgcatttttcgcatcgctccggcttctctccgccgtgtttcacttgcaaaattcggtccatccgctgctcaatctcttcaagttctacttccattcggttttcatctatattgatcaccgctttgtccggcgggtcctctttagacacccctacgatcaggggctcaagccattcgctccgtccagtcattcttttttcaagctcagcatacagtgccatttgtgcaatatagccatttgcctcgacgaatgagcaatagcctatttccgggtcccaaactttctcccgcaatgaccgcgctgttttcagatcggagaaacggccgccagctgggttgtatacgtccagctttcctttccacggaacaccgaacaattcagcagttacgatgacttccttttctccttgcaaaacgaacatacagagttcgtcatgttgaatcgcctcaatcatcagatcagctaactgatactgcttgtacagctggcccttttgtgtaaaaagtgatggggtgttctttttaaattcatcaaaagcctgttcaccttcaagccaggcatgaacgtattggccgaagaggagcgcctccgatgtgggcggtgtccattctccgttcaactttgccatcgtagcagcctcgcattgcaaaaagcttttatattgagaatttgacatgtagtatctatcaatctcgttagagtaatagttctccttgttcagtgccggtatccgcattagcaggatcacccgccttttctttactatcagcaggcttgtcagcttgctctttcagctttttgaattcttcctcagcctttgatttagtcgcgctagcggccttcacattgaagtaatcctctttctttgccatcccatcacgcagggccgtgtaaatacgaccaattttcaggaaatcttgctcagtgaaggcatcaacattactgccgatgtactcctgaatcatttccttagtgatgccaaactcttttttaaaaagggagaaggcacttctgagtcggtcttccagtggttccttatgtccactaatcaatgttttttgacacatatctaccgccgcatcaacgatgtcgcccggaatcactccaagtatgcaagcacgaacccggcgggctccttgattggcaaccatttcgtaaatatcccttggatcatcaagtttggtaatggcgccccgtgccttccgttcatgcttcacagtgaaaattttggtttgccgggtattcgtttcaagatcccaagcgtaagccatgacagatgattcaccggccttttgttccaactccataattccgtaatcaatgttcccccaattttgagccaaggcctctgccagccggatagatggaccggaaacctttgtgccgccgcgaggatattcatacaccgcattctcggccaagagcctccgttcgcatgcttttttaatccggtcaaacgctgcgtatacgtcccgtgggaatttctttgcgatgaccattgccgcctgtacttcttgagcctgtcggcttaccagcgcttccgtagttacgccagtagcctgctgaggggctggcatgtaatctgagtaatctacctgagatagtccgttcattatgcttctgccacctttctcaaataagcttctgtgccgagccgctgccattctcggtatgcatccattgacgggaaggaaaataccggtttgcctttactgaacatgatcgagccgccgacttgtctcagacgcttctgatcgtccgcccggtcactgaaagatgctgttattcgttttgccatgtgtaaaacctccattgtcttttatgaggtaatttggtataataaaggaactaatctttaccaaaagaccttttgaagtccactctgccaagtgggctttttttattgctcatttttaaattcaaaaccaagatgctccttcagataccgctcaaggttttccctcaagatgacttctccttcagcactatctatcacgtaatcatcgaaagccgttacttcatccccaaagaaatctttttgcgtttccggctcagtcagcttgtcatgccagttattcaagaccatcggattttcaatattcatcgcgaacacctgcccacaacactcaagtgaattccgcgggctgccatatttaaaacagtttgatgtaagtgccctttattagccagcctattaatatcctccgcaataaccttgatgctccctgcaagactgatagcttcttcgtaatcgccatcccgtaacgcctccgaaagcaaggtagagagctcttccgccgactcgatttttctttttgctgaatctgcatccgatttaagaaattgatggattttcataccaacaatgcctgcctttcctctgtttttgccatcgcaacctgatttactagcgctttacgggtccatctttcggccagctctttcatattcagaccatgactgcgggccagcgaatatatcagcgttttgtttgctgggatcagatcaaaaatctgtttaatatcggccatgggcagttcttctgcctgtccgctcggtctatcatttgccaaccagcgcgctaaatgctttgtggcttgcaatgcttcttcaagctggtgaaccatgttgattaccgctgcgcttgcgctctcgttaagagctgggtctattggagccgccgttgtcgggtgcagccgaaaaagataatgtacgagatcaatatgttcataggcctcacacgcctcaaaccatctgatgcataattcgggggtcagcttacaaaaaccattttcaacatcggaaacgtaacgttgatccttcccgcctatcaaactgccgatctgatattgtgtaaacccggcctctttacgaacacagcgcatgatcttcggtaaattccgcaagttgtacggattgttctccatatgtttgcctcctgatatattcagctgtttgctgttaaaatttaattagggtcaaaagatgttttattgtattggcttatgatttttcgaatatccggccttctggctctaaacttcgctttgtggccacaataaaaacaaatattcactctagagagcctctttcatgattgcttgttcttgagcttcgatccatgcatcaatattgtgtttggtaaagaaaatccgatttcgcacacgaaagtgaggaatttgtttttctcgaaccattgtgtaaattgtgtcatgatgaacacccaggtaatcagcagtttcctgaacagtaagtgtattgcgtgtcatttttgacctcctatgctgtgcttgtatgagattcttgtcctttttgattaaaaaaaagttctttaatatcacaatctagaatttcagcaaccttaaaagcatcttccattttaggggtagaataaccattttcccaatttgaaatagttgattttttatacataagtttttcggctaaattctcctgtgttaagcctttagctttccttgcattcacaagtttataatttttcattgagtcacctcctgtataaggaacttgtacttcatgacctcattataggtataagaatcttgtatgtcaataataatgtatgaaaaacttgtacaaaagcgtaatttttttctttttgttgtacaattaccttgtactaattatggaggaaatccacatgttatctaaaagattaaaaatttgtcgtaagcaaaaaaaacttactcaaacggagttagctcaaaaggtaaaaaccactaaaggtactataagcaattatgagaacggacatagcacgccttctaatgaaatgcttcgtgaccttgctgacgccctcgatacaactactgactatctattaggcaggattgataatcatatgaacttcattagggagtcatctgaattttatgatacgtttggagatgatgacttacaactcgcctttagagaagcacgtgatttctcagaagaaagtcaaaaacaagcaattgactttataaagtatctcaaagagaaagaagaacgcgaaggacgaaaaagccgaaaaaacaataacgactaacaagtgataaaaataatgatataaccgagattattgctcctattatttctattatgtttattcagtttaaattctgtttactaataagatctgaattctcttccggattggtcctgaaccccttctggaaaggtaatatttacaagcccttccccccttataaaacaaaggtttcagtatttaatctcatccggatttccttccgaactgattcggaattctcttcgggataaaaacttgaaaaaatttgattaaaacccagaaataactaaccgataatatatctagaagacatttcaataaaaaggggaaattattttgaaaaaatggttgttatgtatcggtgctttatctttgagtttttctttagcagcgtgcgggtctgattcagcttcaactgataaaacagattcggatagcaataagacaacgcagcaagaagacaaaggtaaacaagagacaaagacagatcagaaaacagagacagaaaagcaatcaaataacaaaagtgctgatgagtcaaaaaaatcctcagctaaagagacacctgataagaaaaagctggtggatgtaacactaaacaaaacagttgatggagatacaattaaagtcaattataaaggcgaagttaaaactgttcgttatttgctcattgatactcctgaaactaaaaaaccaaattcttgtgtccaaccatatggagaagatgcttcggcgcgaaataaacagctggtgaacagtggtaagctacaattagaatttgataaaggtgaccgtactgataagtatggaagaatgctagcttacgtttatgttgatggaaaatcagtacaagaaacattacttaaagaaggattagctcgagttgcttatgtatatgaaccaaacacgaagtatttaggtacttatgaaaaagatcaggaagttgccaaaaataaggacttgaaaatttggagtaagaatggctatacaactgataaaggatttaatggttgtgtaacaaagcctaaaaaatcagtaactgcttctaaacctgttgaaaaatcggctacaactcataaatcgactacttcacataaatcaagctcaaacagttcaaattctagcgaaagtagctcaacagcaagcagttcttctaactctacacaagcctccacatctactggtggaacagaacactttgcaaactgcacagaattaagaaagaaatatcctcatggtgtcccgagttctcatccggcataccaatcgaaaatggatcgtgatcacgacaactatgcttgtgagcgatgaatagaggagattagtgatggcacaaaaatttcaaaaactaaactataagtatggaatcatagactatccaatatttcttaaagagcttgaatctatcattcaagaattccctaaatcagaaagaaagttttacgaatatgcaattaaagctttaaaaaaagaagttgataaaaaggaaaagattctacatataacttctgccgatccgaagttgactaagtttggttttatggttatcactgaaaagaaacttttatttgtcattatgaaaggcggtattttcggtggtgccgatactgaagttgttgaatttaaaagtatcaaagaagttgactttgacattgccccaactccattaggaatggctacaatgcaattgggaattctccatttaaaaatcaaaggtaagcttggaatgagtaacaagcgcaccattagaaatattgatgaacattcacttgatagaatagtatctatcctaagagaccaaataaaataagcccggtttgggcttttctttcacaccaaaaacagaacatacattccctatatggtggtgttttttatgtcaatccagttatcgcaccttgaagaagaagtgaaaaaaatctatcacaaattaaatattgaaactcctgaagacattgatttagaaaggattgccgcggcatttcgtatctggctgcattacgagcaaagagaaagctgcatgttccaaattaacggtgagtatagcgtcgttcttgatgctcgtgcctctccacaagaacaatggcaggactttgtgcatgagctatgccatgtcttaaaacatactggaaaccaatttcacatgaatagaatgttcaggcagcttcaggaataccaggcgaacagtttcatgtatcacttctgcgtaccaacgttcatgctcataaaaatgcagctgccccgtcttaaatcagaggccattaaattaataggagatacatttaatgtgacatattccttggccgctaaacggctagaaatattcaacagaaaacagttttcaattctctggcataaaaagctccatcaaataagtaaattgaatgttaggaggtagccaaatggctagtatagagccccgtggaaaaaactcttttagattaattgttgagaatggttacgatgccaaaggtaaaagggatagaagaaagaaaacaattcgtatagaagacccaaagctattaaagactaaacgaaaattacaagagtatcttgaggaccagctgcaccgtttcagaattgaagtagaggccggcgaatatattgcaccggaaaaagctacttttgaatcatttgtagagaagtgggttgaaaagaaactctttaataagaatggtaagccttactcttatacaacatctgtcaaatattcaaatcacttaaaaaatcacattcttccagcattaggtcataaaaaaatagacaaaataaaaagccttcatattgttgattttatagatgatttatctaaagatggggctagaaaagatggaaagcctggcggattaggtgatcaaacaatcaaagatatatttaaaatcttacaagcattatttaaaactgccacagaggaatggaaattgataaaagacgaccctattgagggattgagttcgccagaagctgagaataaagaaatgaattttcttgaatctgacgaagcagctgaatgtattaaagtgttgtatgaaatagatattaaatggcgcttatattatcttgcagctctgatcggggggcttcgtagaggggaagctcttgcctgtgaatggcacttggatgtagattgggacaaaggtggaatatatgtaaatagatcaatttctaaaacaattaacggagagcctcatgtcaaaagcccaaagtcaaaaagttctcaacggttcgtcaaaatgcctgatttttatatgaatgagttggctaaattttatcgcatatggaaaaaagaaaaattgttgcttggcgatgtatgggaaggcggagaacatcaatatgtgtttcacagtggtaaaggaaaaccttactactatacaacccctaccgcaaaatggactaaaataaaaaagaagtacggtctaaaagatgttcgtcttcatgacttgcggcatactatggtggctctccttatggaagctggcgaaagtctcagtgctattcaacgaagagctggacatgccagtgctcgaacaactagtgatatttatggtcatgttaccgagaaactcgaaaatagcacagtaaatcactttaacaagttcgaccctagaaacctagcacaaaaacagagctgattttgaattccccttcaaaatcagctcaaaaaaataatttagtccccaattcgtccccaactcgatgaatgatgacaaaatcaataaataagcaaagtaaaaaacccttgctgcgcaagggttttagctatgattccgactgggctcgaaccagcgacctctaccctgtcaaggtagcgctctcccagctgagctacggaatcatgatatgtatgtgttgctgggtatgttgttgtctctctgacatttataattatatatcctggttatccgttcgtcaacactttttttatcaaaaataaaaaaagggcgccgcgcaaatttggcgtcacccttttcgtttatgatctcactccggcgggggcgatttttttcagcgcctgctcgaaatcgcgttccaaatcttcggcgttttcgactccgacgctcaggcgcaggaggccgtctgtgatgccgcgtttctccctctctgctttcggcatggcggcatgcgacatggcagcagggtatgagagaatggattcgacggcgccgaggctgacggcgaatacaggaagcgatacgttttcgaccagctttttgacggcttctttgctttccagttcaaaggacagaacggcgcccgctccgctcgcttgccgtttatgagtgtcggctcccgggtgtccggcaagccccggatagtaaacgtttttgacggcgggatgcccgtgaaagtaggcagccagccgttcagccgtccggctcgctttttccagtcttacctgtaatgtttttaatcctctcaatacgagccagcagtcctgaacgccaagcaccgctccaaacgagttttgcagcttatacagctgattgccgagctcttcatcctttacggcggcaagccctgacaggacgtcactgtgcccgcttaaaaatttcgtcgcgctgtgaagcacgatgtctacgccgaggtcaagcggacgctgcagcgcaggcgtcataaatgtattgtcaaggtatgtcagacagccgtgatcctttgccagttggacgacggccttaatatccgttatgccgagcgtcggatttgacggtgtttccatatagatggctttcgtattcggccggatggcgcaggcgaccgcttctgtgtccgtcatatcgacaaaggtgtgttcgattccgaagcgggacagcacctcagtcaccattcggaatgttccgccgtaaacatcctccgtgacgagcacatggtcgccttgggataagagcagaaatgccgtcgaaatcgcagccattccggagctgaaagcaaaacctctcgttccgccttcaagacccgcaattgtttcttcaagcgctgttcttgtcggtgtgccggaacggctgtaatcatatgtcccgaactcctcaaatgatgactgatggaatgtggaagcatgctggatcggcacgctgacggctccggtggctgcgtctgttttaaatggattgtgcacaagcttggtttccagcgtccaattgtgattactcatgcgacacggccccctctcttacttgctgtaatgcctgctttacatcccgcttcaaatcttctgcatattcaattcccactgaaaatctcagcagacggttgcagacgccgtttgcgatgcggatatcttccggaatgtccatgtgcgtctgtgtcgcggggtatgtaataaagctttccacccctccgagactttctgcaaaacagatcgttttcagcgcctttaaaaacggattgacccattcctctttttgcagccggaaagacagcattccgccttttccgggatataacacatcggcgatttcctcttctttttctaaaaattccgcaagttcacgggcgttttcttcatgacggcgcatcctgagtccgagtgttttcatccctctcattaaaagccacgaatcgaacggcgggagaacggcgccgatcgcattttggtgattaaacatgacgtcgccgagctcttcatcctttacgacagccagaccggcaaggagatcattgtgcccggctaaatattttgtggcgctgtgaatgacgatgtcggctcccagttcaagcggacgctggagcaccggggtgtaaaacgtattatccacaatcaaaagcaggccggcttctttcgtaatccgagcgattttttctatgtccgcctcctgcattaacggatttgtcggcgtttcaacaaatacagctttcgtgttttccgttattttggagcgtaaacagtcttcatcactgaaatcatcataaataaagcttaacccgtattttctccactcattttcaaacaaacggtaagtgcctccgtataaatcggaggatacaatcaattcatccccgcttttaaataaagccataatggtttgaatggctgccattcccgagctgaaagcaaagcctctcgcaccgttctccaacacggcgatggcgtcttcaacgagctggcgagtcgggtttttcgtgcgcacgtaatcaaagcctgtagattctcctattcctctatggcggtaagcggtggacagataaatcggcggactgaccgttcccgttgcttcttcgcttctatttccgatttgggctaattttgtttcaacatgctgcatcatcagcaggcaccatcctttttcaaaaataaaaaagctccctcttcataagaagaaggagcttttctcttcctcttatcttccaagcatgtgaatcgcttgctggatttagcaccttggcactttgccttcctgcggcaaagcaaaccggttgctgaggtttcaaagggccagtccctccacctctcgtgataagaatattgttttgtattttctgattgttctatattaactcactataaaatgaatttcaacaactttttgattttctgaactctctcaagaagtgcatctgaagaaagaaatttctaataattcatggtacaatagggaaaaaccattaagacaagaagcggcctggaggaatgcgaagtggcaccgaaaaacggaatcattcatgagaaaaaacttttctcccgtgagcttgaagaagaaatgaccgttctggtctacctgccaaacacctactcccccctgtataaatatcatacggtcatcgcccaggacggccatgattacttcagattagggaaaatcgggcggcaggcggaagagctcatgtcaaagggggaaattgaccgctgcatcattatcggcgtcccctataaaaatgtgcgggagcgaagagacacataccatcccgaaggctctaagttcgcctcatataaacggtttatcgcaaatgagctcgttccttttatcgacaaagaatacccgacttatcaagtcggatacggccgcacgatgatcggggattccctcggcggaaccgtttcgctcatgacggcgattgactatccgaacatgttcggaaacgtcatcatgcagtctccgtatgttgacgggcacgtcctggatgccgtccgggagtcggaggatctcaaacagatttccgtttatcatcaaatcggagaaaaagaaaccgacgttcacacaacggacggccaggttcttgatttcaccgcgccgaacgaagagctcaaacagctgctggaaagcaaacagtctgaatacacgtatgaaaccttcgacggggatcataagtggacttactggcagccgctcataacgccggcgctgaaaaaaatgctgtaaccattcatttaaggagggaactttcatgaaatacggtattgttttatttccatcaaaaaaattacaggatctcgcaaattcgtaccggaaacgctacgacccgagctacgcgctcataccgccgcacctgacggtaagagatccgtttgaagcgacagaacaggaaatcgagcaggtcgtatcacagctgagacagacggcgaaagagtcgcacccgctcgttctgaaaatcacaaaatacagctcgttttctcctgtaaataatgtgatatacatgaaagcggagccgacggaggaattaaaaacgctgagtgagaaatgctactcaggagcattatccggagagccggaatacagcttcgttccgcatgtcacagtcggccagaagctgtcgtcagatgaacattccgacgtactcgggcagctgaaaatgctggacatttcccacgaagaagtcatcgaccgttttcacttgctctaccagctggataacggctcatggactgtgtacgaaacatttttattaggcaagggagaataactgtttggaagccatcattgcaaaaacggaaaaacagctgaacgacgcttttttcgtcagaaaagaggtctttgttaaagagcagcacgttccggaagaagaagaaattgatcaattcgaagacacgtcagagcatattgtcgtatatgacggcggccagccggtcggagccggcagatggcgcttgaaagacggtcatggaaaattagagcgcatctgcgtgatgaaaagccatcgctctctcggtgtaggcgccatcattatgcgggcgcttgaaaaagcggcggaagccaagggcgccgacagctttatcttacatgcgcagacacaggcggttccgttttacgaaaaacaaggataccgagtcacgtctggcgaagaatttctagatgcgggcattccccatctggaaatggtaaagaaacaaaaactataaaatcaaaaacactcctgttgatatgacaggagtgtttttttatgaaaattatactttttcaagaattttatggaatttaattgtatgtttagtatgcgaagtattacaattcatacaaaaaatacaattcatatgggatgtttaaacatgacagcaccaaaagggaagcatatattcgggactgtgaaagtgggcacaaaaggacagattgtcattcctaaagaagcaagagacgtttttgatataaagcccggggactcactgcttatgctcggggatgaccagcagggcatcgcacttgttaaacaagaactctttttcgaatttgcaaaagatatcttaaacgcaaagcaaatcaatacagatggcgaggatgagtaaatgcacgcgattgagctgaagcaattaactaaacattataaagaaaccgccgctgttgaccgacttgaattttcaattgaaaaaggagaatttttcgctttactcggagagaacggagccggaaaaacgacattaatccggatgctttgcggcctcctttctccagatgaaggtgatgcatcagtgcttggtcacagcattttgactgatttggataaaataaaaccgaaaatgaatatgtctccgcaggaaacagccatcgcccctaatttaaccgtacgggaaaacttagagtttatagccggagtctacggaattccgaaaaaagaaggaaaaaaaagaacggatgagatgctcgaattgtttcaattaaaagaaaaagaaagagaaaaaacaaaaacgttatcaggcggaatgcagcgccggctcagcatcgcaatgggaatgattacaaaaccggatatttatttcttagatgagccgacattaggtctggacgtccgttcacgccgcgagttgtggaaaaatcttgagtcattaaagggagacatgacgatcattttaacgacacactatctagaagaagctgaagccctggcagaccgtatttgcattttagaaaatgggacattaaaagcactgggtacggctgaggacctgaaaaagcaaactcattcagccacatttgaagatgcctttttagcgatttgtgacggggaggcggggctttatgcttgatttcgccatacgcaaccgcaaagaaatttttcgtgatcccctatctatcatccttggaatcgctctgcctgttattctattgtttctgtttactacgattgagaaaaatgcgccgcttgacacttttaaagttcagcatttagcacccggacttattgttttcggttttgctttcctcacgatgttctctgcattgctgatcgcaaaagacaaacagaccgcccttctgacccgtttgtttgcttctcctttaaaaacagccgattatgtcatcggttatgctttgccaatgctgcctttagccatattacaaatcgtcatttgttttatcgcagctgctgctgccggcttatccgccgaatggatcaatcttctcgcgggtatcgccgtgctgctgccgattgcgatgatgtccgttttcttcggtttatgtttaggagctgtgtttacggacaaacaaatttcaggtatcggtactatttatattacccttgttcaatttctcggcggggcttggatggatgtcagtctgcttggtgagacgttcaaacatatagcttatgccttaccgtttattcactcgatcgaactggctcaggaagtcatatccggagattattcttcattccaacagcatatttggccgatagggggatatgccgttttggcgcttgcgcttgctttccttagtttgatgaaaatcaggaagagataaaaaaccggcactccgtaacgggagcgccggtcttctttatttattttctttcagaaggcttatcgtatgcggcagcagacggccatcccccgggctgccatgccccgggacgacaatgcttatgtcttggtatcttttcatcactttctgaacagcgcgcggccactgatccggataaaaacccggagtaggcacgatttcctttgtttctaaagacttgattaagcatccgccgaataagagcttatcctgaggcagccagacggtgatattgtcttccgtatgcccttttcccggataaaacgtttccatttccatatcgccaaattgcagctttgccacgttttttaaatctccgagcggccgggcatatccctgctttcgggcgaagtcggctgtcagcttcgtgctgtgcacctttacaccgtatttgtacagggtgttcagcccgcctatccgatcatcatgggcgtgtgtcacaatggcatcggtcatccttttgccgggaaactgctggtttatttgtgtcattaattgctctgtaagactgtcattccacggagtgtcgatcaacacgattcctttggaagtatcaagaagcaatccgttcgcagggacgggtctcccgtctgccatacctgtgcttgtatgcatccagacatgcggcgccagctgtgtgagcgtgacaccttttaattcggagccctctgccgcgtgtgccggtttcatcccggctgtaaagaggcccaatagaaacagccctgcgatgaataatgtaaatcttctcaattaaatcattcctttcttctttcatatatacgactcgaaaaaagcccggatatttccgggcttttttacacgcattgattaatcaatcggccttttcccatgatttgcgggaggcgggaaagagagcgcttacgtttttcctcattgactttctttgctgcggctgcggtgttttcctgacggcgctccacctctctgtacaccctgtcattggcgagggcggccgctttcgtaacgccggcgtaatcaggcttataacccgctgaccggtttgcgtattgagtgtattgctggttttgaatccgtcctgcataaatcatatgtacccctccccttcgcttttcatttcccttaatcttactttttgaaacgcggttcttttgttatgatattctttgtctatcaaatggatgaacaccttttaatgggaggacccctttttgaaatgcgcccgactgaataaccgaacgatacatttacatacatattctagagaacattaccaattcctttttgaagaagcccaaaaagggaatattttttgcgcacattgtgaccagcctgtcttgatgcggctttccattttagagcagccggcgttttatcaccggcaaaagggagatttcaccgcctgtgaaaaagcatgcgaggcgaaggagccaaaagcggagaaagaaaaagaagagtataaggaagccggcatgttccgcctgccgaaaggaaaagccatttccgagagttcgaaaccgatcgtctcagaatggaaaagcccgaaaaaagtgcctgcccccgagccgttttcaccgacatctgaggcagctgatacatcgctgtttcccggtatcggactgaaccgtgaacaaatgcgggccgtcacagaaacggacgggcctttgctcgtgcttgccggagctggaagcggaaaaacaagggtgctgacggcacgcgctgcccatatgattgaacatctcggcatttcacctgagaacatgctgcttgtgacctttacgacaaaagccgtggccgaaatgaaagagcggatggcaaatgagtacgggctggcagccgggagagtctcccgcctcgtgaccggaacattccacagctttttctataaaatactctatcattatgattcttcaaaatggaacggcagccagctcttaaaaatggagtggcaaagagagcaatatgtgaaaaaggcgctctatgaagaaaacttggatgagaaagagtttcccgtcgaccaagcgcttcagctgatcggctgctggaaaaacacgtatctccctcatgagacaattccgcttgcggatgactgggagaaaaaagtatacaggctctacgaacattacgaacggcagaagcgggaaaaacggcaatttgattttgatgacatggctcaaggctgttatgaactgtttcaaagccggcctgatattctcgcacagtatcaaaccagattttctcatattttaattgatgagtttcaagatattaatcctgtacagtacaaaataatgcaattgattgcaagccctgagaataacttgtgcggcgtgggggatgatgatcaatccatttatgcgttccgcggcagcagcccgtctttcattctcgattttcagaaggattatccggcagcaaagaccatttacttaacggcaaattaccgctcgccgcatccgatcgtctcgagtgcccatgccgtcgtaaagaaaaataaaaaacggtatgaaaaaacactttctgccgtcaaagacggtgttcatgcccccgtgatgttttttccttacgatgaggaagaagaagcgactatgatcgtttccgatatgaaagagaaaattcaaaacggcgcgagccctgacgattttgccgttctttaccggacgaacagcgccggacgggccatttatgaaagactgcatcaatcatcgattccttatcatgccgaccgcggcgtacagacgttttacagccgccgaatcgtccggcagatcctcgcctacttatatgcgagtcagaacgaggatgatacggatgcagtgaaagatctgctgcccgccttatttttaaagcaatccgccctgcaaaccttaaaggcgctgtccatcacagaagattgcacgatgattaaggcgctgacgaaactgcctgacctgaagccgtttcaaatcgggaagatcaagcagatcgttccgtttttcgcaagcatccggacaatgaaacccgttgaagccattaccttcgcagaaagcaaaatgggcttttccgagtatttaaaaaaacggggaaacgaagggaataaactggaaaaaggctctgatgatctccgtgatgtcaaagtggccgccaaaaaattcaaaaccattccggattttcttgcgcatgtcgatcatatgcgcgccgccgagaatctgaaaaccaatgaaaacggcgtcgaactgctgaccattcaccgctcgaaaggtcttgaattcaatacggtctatattttaggcgcggctgacggctcgatccctcatgactttgcgcttgagacggcgagacagggcgatcccgctccgctcgaggaagaaagacggcttctgtacgtcgcaatgacaagggccatgcagcatttatatgtatcatgtcctgcgaacaggcggggaaaaacagcccgcagttcaaggtttctcgagccccttctgcggatggacagacggagcgcactcaagatataaagaacccggcagatgactgccgggcttttctcatataaaaaggcctttcaataaggccggctgacgcctatttattgttcatcattttagaaatggtgccaaaatcaagtttctcttttccgcttgtaatagattgaacgattttgtcttccaattctttcggtacacgcttgttagccagctgggataccttctgaatgacgcctctcaccgtgttttcatctttgaaattggcattttgcagtgatccggcgagattcataacatccttcatgctgacgcctgttttcttctcaatatttttgaaaaattgattatccatgttgtgcctcctttttgtggagtaatacgatattgtatgaacaaagcgtggaacatgtgcccgtaagacaacggaaaaattctgcacacccgttttcatgctccttcatacatcaggcaagcacgggactgaacgatcccgcgcttatcctgggtcttgctaaggtttagccgaaaaaggatgcaccgacaatgatcagaaggatgaacaatacgacaacaagaacaaatgttgagccgtatccgcctccgacatagccaccgccgtatccgccgcagccgccgtaaccgccatagccgccaccgaatccgccatatccgaatcccatatctaagcacctcctttactctctatactctatgtgagcagacatgtttggcttggataaatgcatagggccggtgcggatttcatttattttattgagaatgctcatttttcttcagttttgcttcggtttcagcggcaaacacatctatccatttctcaaagcgcaatcccgcttcatcaaactcagacagctgcttttcaatagaaaagatatgtttgttatgttcccgctgattttgattgtgccggcggtatcttccgtttattaacaattcaaatatattcataacatcccccctcctatgatctatgcggaacagggtccggtgttcagccaaaaaacaaaaaaaccggaatctccggtttcttttagaaaacggctatttcggttttttcttttggccgcagccgcagcctttctttttaattttttttccgtaaggctgatactcagttgatttgtatggagagttttgggaaggtttgcttgattgattcatggtgatccttcctttccttatgtcatatatgccattttatgcagaaagtgacggcaagttgctgatggaaccgccttattcctgaagaagacgtgacaccgcagcttcaatgatccctgccgcgccggctatggctaaaagtaaaatcagccattgcgcagcctgcggcatcacaatctgcgccgcaattaaaaaggcggcgcaccatacgcccgtacaccagtagcagctgagaagttcaccgataaatgccctgatgcctttcccttttatgacaatgtaggtttctgtcgtaccgtcgggtgcggtttctgttttttcctcatgaaaaaggctccggagcggcgccataatggtgtcaaatacgaaaagccttgccagccgaaaaacggcaaacgataacagaataaatgaaagccaattgataaccacctgttcactcctttttaaaacatgacctctttatacatatgcgaaaaccctgatcttcatgaatcgcaccttgtccggtaaaaaaataggtgcggtttagttgtttttcttattccgctcagcgtttcatttgcattatataaagtatgaatgagaaaggagtgaaggttatgtcgtttgaagaaaaagtcgaaacactgcaaccgcaaatatacgaacaattatccaacgaattcgagcagacgatcgaagtgattgattgcgaaaatgtcacaatagatacaacacatataacggccgctctttctatacaagcctcagttactacggcgattatcctcgcgacacagctcgtgatcgcagatgaagacacagccgaccaaatggtaaccgaactgctgatcctggatgattgccagataaaaaaaaggaccgtcattcaagtcctgaacagccgcaatattaaaatcacactgacagcagacgatattatggcctttgtacaaattttatttcaattattaaacatactttttgctgaactagacatcctttaacctttcttttcaaatatttaaatagaggtgagaacaaatggcagataacgaaaaattaaaaaaagaactcgaaaatctaccagaagtggatccgcttttaaaagtgcttgtcagcaatgtcttcaaaaaacacggcgtgacaaaggataaaatgcgggaaatacctgatgaagaaaaagaaatgctgatcgcattagtcaaagacatgcaggcgaaatcagaagcttttcttgaaagccagaaacagaaaaaagagcaggaaaaagcgcaagaacagcagacaaatccgcaaacccgcagagaacaattaatcgaacagctccggcaaagacgccaaaatcccggtcaataactaaaaaatagtgatttttatcaggatatatgcctgagtcaaagtaaggggccggccatcaattgcctgaacccgagactgctgaaccgcacacattcttaatcgaaaagcataaaaataagctgccggattaaagaattcaggcagctttttgtatggttaaaaaccgagcggatgcagcgaggtgatatcgctaatggcaagctccgcaggcgcaccgttgctcgtcgtcctcaaatagatggcatcattttttctgccgacgatcacgcctctgtaagttttcccgttggcttctatcagacaaagcgcccgcggcatattatgcggcagcttcgttaagaaatcaattttttcaacaatggacattctgctcatcggctttttcacgcgcttcggcggaactttctcctccggggcgtcattgtgaaccgcttcaggctctttttcagcggtgtcaggttcatcagcagcttcctgcacttgcgccggaacttcttgagaggcttcctccgcgcggctgtgctgtacaggcgtctgattttccggtttggcagacgcggctccgtcgggctgagtcttacattcttcctcctgctttccaaacgccggctcttcttccggcggctgatgtgctttcctttttttgattaatatgtcctgcattgatgattgcgtgtctgtataatccggctgaacaatatacatgagcggttttttgtccgcgcttctgttttgttttgacatcttcatccctccgattctgtcatgttttatctatatgacagaatgattaaaatcagaagaaagaaaaaagcaatccctgaaagggactgcttgtcaattaacgtgcggtaatatggaaaccggaatcaacgtgaagattttcgcccgtgatgcctcttgagaggtcactgaacaagaatgcagccgtgtcgcccacttcttcaggcgttgtcgtgcggcgcagcggtgcgcgctcttcgatttctttcaggatagagttgaaatcactgattccttttgcagacagcgtgcggatcgggcctgctgaaatactgttgacgcggatgttttcttttcctaagtcagcggctaaatatctgacgctcgcatcaagagacgcttttgccacacccattacgttatagtttgaaacgacgcgctctccgccgaggtaagtgagtgtaacgatgcttccgccttcagtcatgatcggacgcgccgcttttgcgaccgctgtcagagagtaagaactgatgttatgcgcaagcaggaatccttcacggttcgtatttaaatattcaccgacaagctcttctttgtttgcaaacgcgatgcagtgcgcgatgccgtgaatcacgccgacctgctctttaatgctcgcaaagcaagtttcgatctcagcgtcatttgtcacatcacacggaaggatgagagaatcatttctttctaatgtagccgcaaggtcatgaactgatttttccaagcgttctcctgcgtatgtgaaaatgaggcgcgctccggcttcatgcagcgagcgggcgattccccaggcgatactgcgtttattggcgacgcccatcacaacgatgttgcggccttcaagtgaaaaattcatatgtataaagcctcctgtaatcgtcttaaagacatagttttagtacctgatcttaatttttatcatatcataaccttgtccagattgaaagcatgggaaaaagaccgctgggtgtcgaagcggtctctttttatctcgtctgcagactgtttcttttaaaggcaaaatgattggtcgggccgtgtcccgctccgatgccgagcgtatgttccaccgcttcacgcacaaaattggcggctatctcaaacgcggtttgaatctgttctccctttgcggtttccgccgtcagcgcagccgcaaacgtgcagcctgttccgtgagtatgtttggtgtcaatataggcgtgactgatttgggtaaaagacgaaccgtcaaataataaatcaacgattttcccctgttccggctgatgtccgccttttatgatgacgttttttgcgccaagcctgcaaaggcattcagccgcttttttccggtcctcaaacgtgcggatttccatccccgtcaatgcctcagcttccggaacattcggcgtaaccgcatagctgcgcggaatcagcagctcttttaacgcggcctgtgattccacccgcagcagggaagcgcctcctttggcaatcatgacggggtcggtgatgagatgatccagcccgtactgatctattttttccgctatttccgcaatcatctctgcgctccacagcatccccgtttttatcgcgtcaggccgtaaatcttccgccaccgcgtcgatctggctgcccagcgcttccctggtgagcggatagatgccgtgaacgcccaatgtgttctgggcggttaccgctgtaatggctgacattccgaagacaccgagctcctgaaaggttttgagatcggcctgaataccggcgccgcctcctgaatctgacccggcaatcgtcaatgctttgcatatgctcatgctgtttttctctcctttcacattatccgatccatttatgataaaaggatttcgctctgctgatatcacttgtaccgtgaattaatgctcttccgtcacgaaacaaaaccatcttgacattgtctgcgcggaacgaaattaaatacgggttggctgacacgtcaagccccgcccgcctgagctgttccgcaagcctttgcagatcaaactgttcggatatccccgttctgatctgtaccgtgttccggccgcacagaaccgccgctttcgtctgattttcataagataaaaacggaaaatcatttgtgccgcagcttggacaatcagccgacttaagctgggcgacgtttatttctgaccgttcatttttccataaatcaaacgaacggagaacatgctcaacaggttcgcccgttaacagcttcagcgcgtctgcagcctgaaaaacggccgtctgcaggacagccgggctgataattcccgccgtatcgcatgtcattccgcctaaaggcaatgtctcaagcagacagtgaagacacggcgtgacaccgggtatgacggtgaatgaaagtccgtagcttccgacacaggcgccgtacagaaagggaattcctttctgtacagccgcgtcattcacaatcatccttgtttcaaagttgtcagtggcatccacgataagggatgcgtcacaaatcaatccgggtgcgttttccgcagtgacatccatgacaaaaccttctacctctacatcactgtttatagatcgcagccgcttttctgctgccgcggctttcggcatttcctgtctgacatcgtcttcggtataaagctgctggcgctggagattactccactccacataatctctgtcggcgatcgttaccttcccgactcctgctctgacaagcatctccgcacttgccgtgccgagcgcacccgcaccgataatcatggcatgagacgaacggagcttctgctggcctgagggaccgatcggctgaaacagctcctgtctggaatatctgtccgtcataccggaagaccgtcacgcggactgcttgcagttccgtaatctttcaccggtattctgccggcttcataagaaaggcggcccgcttctacggcaagcttcattgcccgggccattttgaccggatcatcagcgcctgacacagcagtatttaataacacgccgtcagccccgagctccatcgcgtaggccgcgtctttggaagacccgacgccggcatcgacaatgaccggcaccttcgcctgttcaatgatgaaggaaagattcagcggatttaaaatcccctggcctgaaccgatcggtgaagcgcccggcataatggcatgaactccgagctcctcaagacgccttgcgagcacgacatcatctgacgtatacggcagaacgataaatccctcttcgagcagctgttctgatgctttcaatgtctcaaccggatcaggcaaaagtgaccggctgcatccgataacttctacttttatcatgtcacaaagtccggaagctttggcaagccttgcaattctgactgcctcttcagccgttgcggcgccggctgtattcggcagaagcgtgtacttagataaatcaagctgttcgagaaagtttggctgagactcttcaaagatgttcatccgccgcaccgcaaaggttaaaatatctgattccgaaaccgccaccgcttctttctgaatctcaaaactcggatatttacctgttcctaacagcaatcttgactgaaactgctttcctcctattgttaacatcctcatccgcctcctacaaaatgaacaatttctatgacatcccggtcacacaaacttgtattttcataattctttttttcaatgatttctttatttctctctacaactacgattctgtgatcaagctgatacgattcgagcaaatcctgaaccgttccctcttttcgatcccaatcaatttgttttccgttcagctgaaggatcatatgtgaaccgcctccttgcgatcaattcgaaacgcttcttcccattcatgtttcacctgtttccccaggatcatatcccgcaccatttcagccgttgccggggccaataagatgccgtttctaaaatggccggcggcgaatatgatgccgctgtcttcaggatgccgcccgataaacggctttccgtctcttgtacccggcctgagccccgcccaaaaccggtctattttcatatgttcgatggcgggcagcatggttttcgcttttgagatgacggcttcgatcccgccgatgtcaggcgtatcgctccagtcgccctgtttcattgtggcaccgatgacaagccggccgctttttctcgggacgacataactttgaccatggtaaagggttttggtaagcgggatatggtcattccacacagaaaggcattctcctttcacagggaaaaaaggctgtcccaagccgagctggctgaaaaaccggccgctccatacaccgcttgcaactgcgacttggtcagcataaacatccccgccggatgttgtgatacagaatgctccgttcacccgtttaacggcggtcacatgtgtatgctcatatatatcagcgccatagcgccgcgccccttttgcatacgctttgcagacataatacggctcgacatggacatcgtcttttataaaacttgcgccgagaatgtcctttgaagcgtacggctctttttcaagggcttcttccgctgaaagccaagtgacggaaggtaaatcatccatctttcgtaaacggataatgtcttcttcggtatacgccagtttaagcattccgccgttatggcgcctgatgtcaatgccgcaagcctcctccagctcgcgccctgccgcttcatacagtctttggctgtacatggcgaaatcaaaaaacgcatcccggttttcacattccgcatgagcacccagcattcccgcagcagcgcttgtcgtttttcggccgatcgcaccgtcttcaaacaagacaacgttcttttgagtcttcgccagttcataagaaatggcgcacccgataattccgccgccgataaccgccgtttcatagtgcttcttcataatcggcctcccttattgcgcgtgcataccgttttgccgcttcctcaggattttcagctgagaaaatgcctgacatgacggcaattccgtccggtttcgcctgctttgcctttccgattgtctgcagtgtcactccgccgattgcgattacggggatagaaagcgtgcttttaatatctgagagcaggctgatgcctcttgcttcaagtccttgtttacattcggtttcaaatacatggccgaacaccacataatccgcatcttctttttcagcttggaccgcttctttcagcgaatgaaccgaacgcccgatatgaagatggggaaatctgtttcgcacctgtttgacggaaaagctgcgggccggaagctgaacacggtgtatattggcaaaaagcgcgacatccgcccggtcattaataaccaatttgtccttatcggcgccgccttttttcaaaagtgccaaaagctgcatgatctctcccgctgttttgtcccgctcacggatatggataaagctcacttcatgctgaatcgaaagaatatcctccgccagctcggcaacgggcttgcgattatcggttaccgcgtgcagctccaaaggactccacctcttttccgccctttccggaccagccttctttttgataagccattccccaaaattgatattcataatagcttgaaatcacaaaattctctttcattttcgcgcggatttcctctgtgctgctttcagcaatctcgttaaaacggctgatctgttcttcgacttgctgtctgaaccagtctccgccgtatgtgccgatccatttttcataaatcggatgttccggtttgcattcctttaagtgttcgccgacttcataataaagccaatagcaaggcagaagcgcagctaaaatttctccaaattggccgctcattaccgatctgtacatatgagacgtgtaagaataagccgtcggtgccggtttaaaggccgcacgttcttcttctgtaattcctaaaagctccgtaaactcgcggtgcagcgccatttctgcttcatatgtaccctgagcgtggcccgccatcctgcccgtcgtaaacaagtctttggcatatgcggctccgaacgcctgaacttttgcaaaatgcgtcaagtagtaggaatcctgcagcacgtaatagctgaaacggtcgatcggcaggcttccgtcaccgattcccgttacaaacggatgaacaaaacttccgtcccaccattcggctgccgccagtctgcattcttcagaaaatgtcattatatcttcccccctgataaaataaaaaaaacactttcccgcatcggaaaagtggtttggaatttatatggataaaaggaacccaaaaaaataccgctccacttccctacgcaggtctgaacctgttcaagttatgagggtctaaaagtctcacttttatctcagcccttatgaaggacacccctagtggtcatacgattgattatttacttgttatgccttctatcttatcacgaattgcaatttggtcaagcttcaagaatgtttctcagttccgacacgtagttgcgcgagcctgtaacgatgagacggtctcctgttttcagccgcgtgtctccgtgcggaacgatgctgtccacacctctgaaaatccggacgaaaatcacatcgcccatcagcggaaattcccggagaatgatgccgttatacgccgtgttttccagattgatctgataaagcgaagactcttcgtttgtcaggaggctcatcacgccgggcgcctcgattaacgcgcgcagcagcgtttttgtagacagaaggatagaaaaaatactgatgccctcttccttcagttttgtttcatgttcaaccgagccgacgcttgcaatgatacgctcagtccctttctctttcgcaattaaggcgatttcagcgttcacgtcttcattgcccgtcgccactacaaggatatccgttttgaaaatatcatgggactcaagcgtgccgggctcgtaatcagaaatggtctcaaccgaaaaaacggattccgcaagcttttctccggcattttcctgatccacatgaacgacccgaacttcatattcctcatcaggcaattccagcgtcaccgggagcgtcatttggtttgcgccgataaatgtaatgcgctttttctcctgcggcgcactttgccgtttgtataattttttaaatccgatcggtgtgataatgctggcaataaccgcaaccaacgtcagcgcgccggacatattggcgctgataatgtggagcctttctccgatcgtagccgccgcgatgacaagcgaaagcgtagatgtcagcaaaaaccccgaagcaaacacggttcttttgtcataccatttctttaaataaagcaccgggagcattttgctgataaacagcgcaaccagaagcagcggaatcatcgtcaatattttcggatcttggaagagcgtccaaatgtccagtttcaccccgaccatgacgaaaaagatcggaattaaaaacccgtatccgaatgaatccagctgctccaccatctctttattcggagacagaagcgataccaaaacgcctgctaaaaacgcgccgagaatattttccgccccgagagattctgacaaagcgacaagcacgataatcagtgtgaaaatggctctcgtgccgatctggacggtgcctttagacatcgactgcacaaatgagcggtgtttaaagatcctgccgaagaaatacagcacgactcccgcggcaaagagaatcaaaagaagccacatatttccgctgtcttctccgtaaagagaagagaagaaagcgagcagaatcatcgtcgccaagtccgcaataacggcgacaagcaaaatgatctggccgatattggagttcatgatcctttcttcttttaaggtcggaaccaccactccgagtgatatcgtcgaaataataagcgtcattaaaaatgcgttttgaataaaaccggctaagacaaagccgtaggacagcagcaatgataaaataaagatgccgaaaaatataatcagtgcggcagaaaacgtgttgggcgcttccttgccgttcggaaggaattgttttttcttccctttctcaaatgacgaaaaatcaatttccaaaccgcttaaaaacattaaaaagataaagccgaggacagacagcgtctccagccatgtgtctccctgaacgacgagattcaggccgctttttccgataataagccccatgatgatttccgcgacgacaaccggaatgctgagcttaaaccgatgcagaaggagcggagtcaaaaaagcgacgatcagaacgacgactaaagatgcgactgatgtgtgttccattagtaaatacctccttaaaacaagggttataaaagcccgcttaatgcggacaaaaccttacttttttaaaaacataacgcatattctaacaaggctgaccgcgaaaaaaaagtgataaggctttatttctttaattctttttttaatttgtgccaaaacggcgtaattaggtataggaattaaccccataataaataaaaaaccgttcaaaggaggctgacacaaatggcttatgacatcatcagcgatatacacggatgttatgatgaaatgatcgctctaatgcaaaagctcggatatgaagtgaaagacggaacgcccgtccatcctgaaggcagaacgcttgtctttgcgggggacttaaccgacagaggccctaaatccgttgaggtgatgcgttttgtgacaaaagcatatgaaaaaggagccgtacgttatgtcccgggaaatcattgcaacaaactgtatcgctacttaaaaggaaaccccgtaaaagtgatgcacggactggaaacaacggcagcggaactgaaagagctgtctcccgctgacagaacggaaatatccagacagtttatccgattatatgagtcagcgccgctttacgacattttacataacggcgagctcgttgtcgcccacgctggcataaaagctgacgatatcggtaaatacacgcgtaaggtgaaggagtttgttctgtacggtgatatcacgggagaaacctatcccgacggcaggcccgtcagaagagactgggctgccgcttatgaaggcaaagcatgggtggtttacggccataccccggtaaaacgcccccggatcgtcaaccgtacgatcaatattgatacaggctgtgtcttcggcaataagctgacaggctttcgttttccggagcacgaaaccgtttctgtaacaagctcaatgccgtatgatgcatcacgatttcgcgaggatgacggcacgcagacatgaaaaaaagcccgagaccggttaacggttcgggctttatatgtgttcaatcaatgttttcatatcgtcaggaacgggggcatgaaaaacgagcgtttctccggtcatggggtgtacaaatgaaagcagctcactgtgaagagcctgccgtgcaattccctcgttttttccgccgtacagtgtatcgccgactaacggatggccgagataactcatgtgcacccggatttgatgcgtccgccccgtctccagacgtaacgctgcaagcgtggacgcatgtcccgctttttccgcttgaaaatgcgtcactgctttttgtccctccggcgttaccatccgctcaataatactgtcgggctttcttccgatgggcgcgtccaccgttccttctttctgcagaatgacgccgtgtacgacagcgagataccgcctgttaacaaggcccttcttctgcgctgccgacaaaagggaatgggcaagccgatgcttggcgatcagcatcgctcccgatgtatccctgtcaagacgggtgacaagatgaactgttgactgcacgccgtttttacgatagtggctgatcactccgttcgcgatgctttcggacgggtgctctcttgatggaattgaggaaacatacggctgtttattgaccacaagcacatggtcatcttcataaaggatatcaagcggaaccggctcaggcaaaagcgtttcactcacatgctcctttgggaattcaatcttaagcacatctccggccgctaacacggtgcggacggttacgtgctctccgtttacaagaaggtctccgccgccgaatttaatatcagcgagaagccgctttgaaatgccgagctgcgccgtatattcttttaccgtcatcccggcttccggggcagaaatgttcttttggataaaaaagtttttcaatccgtttcctctttctattcgccttttccgataaaggagtcctgcactcttttccaaaacggaaacgggcggaatcttgcaaatctgactttttcttttgccacccggcacagaatagacttgacatccttatgcagcaaggttaaatgatctatcgtgacttggaagtcgacttcgtttctcggcttgatgacacagttatgatgatcgggaagcaaaagcggcgaaccgacagtcctgaacactctgttattgatggatgccatttccgcaagctgaatcgctctgatggaagggtggatgatcgcgccgcctaacgctttattataagccgtgcttccggaaggcgtggacagacataaaccgtctcccctgaacgtttcaaacagctggcctttaatttcaacgtcagcgacgagactgccttctatgcttttgatcgtacattcgttcaaagccagataccgctcctcacgttcttcatcatgataagtgacaatcacctcaagaaggggatactccacggtgtgatacggcgttttggcgatggccagaacaagcttctctatctcctgcggaacccaatcggcataaaaacccaaatgccccgtgtgaaccccgacaaaagcagttttatcgagacggtcgctgtacctgtggaacgcgtaaagaagcgttccgtcaccgccgacggaaataacgatttccggctctttttcatccaaggtcatgtcaaaatcgagtaaatacgcctgtattttgcttttcagtgtatctgaaacctcgtctccttttgaagaaacggcaaatttcatgccattcccctcctttcctactggtggccgcccgcttttttctttcgtgaaaacgcggcttgggcttcctggatctctccgcggatttctgacatttcttcatcgagccgggatgcggcttctgaggcccgctgcagcctcagctttactttttcgggaatgttcccgctgtatttgtaattcagtgaatgctcaatggttgcccaaaagttcatggcaagcgtccgaatctgtatttctacaagaaggtgcttttctccggacgctgtctgtaaaggatataaaacgacaaggtggtaagaccgatatccgctttctttatgctctgctatgtaatcccgctggtcgacaacggtaaaatcttttctggcaaacagcatatttttgacgatctggatatcatctacaaattggcacataatacgaagccccgcgatatcctgcatcgtttcaatctgatgaagcggtatgcttttccgtctcgctttttcaagtatgctcgccaccggctttacgcggcctgtcacaaattcaatcggtgagtgatcatcttcatactcataaagggttctgacacctttcagcttcacctttaattcttcaacagcctggcggtatggcgctagaaattgctcccattgtttgtcatccatcgtacatcccccaattccgaacctgttctaaagaaatacgcttttcactttttcttccatatctccgtagtttgcattatctttaatattttcaataagataatcgagttcttcatgcagccctgaaagttcaaccgttttgccgccggcctcaagcaccgccggttttctttggtcaagggcctctttcagatccggccatacatggtcttttataatgacatattcaaaagagtcagctgtttcaagtatgtatacaaaagcaaagtgatcggaatcaacaagcatttgacctgaggctttgcgttccgctccgcttaagtcttctccgcacttcagtcggagcgcgtcttctgttaatgatgcattttggatttcaattctcttttgcataatgttctccttttttaacaaagtacagcatttattttatcatatcaaggtcgatattgataaacgtaacctctaaagagataatgggaattatacaatttttcgtcctgaaaggaagactgtcatgacccaagaaatagaaattgagttcaaaaatctgctgacaaaatcagaatttcagaaactaagtgaagcactcggcatgaaaaaacatgattttaagcagcagatcaatcattatttcgacacaaaagatttttctctgaaacaaaaaaaatcagccctccgcatccgtgaaaaaaacggcgcgttcgtcctgacattaaaagagcctgccgcggtcggtctgctggaaacgcaccaagagcttacgtcacctgaccttgacggctttaagattccggaaggccctgtcaaacggcagctggaaggtctcggtatcaattcagaacacatttgctggttcggaacgctgtcaactgaacgcgcggaaaaagaatcagaaaaaggcttaatcattttagatcacagccgatatttagagaaagaagactttgaattggaattcgaggccgctgactgggacgaaggaaaacgggcgtttgaacaattgctcaagcaattcagcatcccggagcggaccactaaaaataaaatccagcgtttttatgaacagaaacaaaaaaaggtggaatgacagagtgaatataacgaattgggcggccattctccagcttcaatcaatggcgctgcaatcaatctctaatacaggcacggcttcaagcggacaatcttcacaaagcccgctttcagatttcagcgcgctgctcagccagtatacggacacagccgtccggcagcagccggaagcgggaattttaaacggggtgcggaccgctcacacttcatattcaccgagaattccggttacagccagttcagcggacgcatcacagaccgcttctcaaagcattaagcctgcgaatgcggcttctgacatcagcaccggaaacttttcaatagacagcgccattcaaaaagcggccgagaaatatggagtggacgaaaagctgatccgcgccgttattaaacaggaatcgggctttaatccgaaagcggtcagcggcgcgggggcaatggggttgatgcagcttatgccttccacggctgaatcactcggggtgtcaaacccgcttgatcccgtccagaacgctgacggcggcacgaagtacttaaagcagatgctcacgaaatacgacgggaatgtgtccttggcgttagccgcctacaacgcgggccccggcaacgtagatcggtacggaggcgttccgccgtttaaggaaacacagcaatatgtcaaaaacataacccggcagtattacgcgtaaaccagagaggcttccttctctggtttttttgcggagtgaaatcttacacatgaatgaaggcgatgtgatatgatatgaaatacaagcgcctgacagaaaggcactttgtttgtagaaataaaatgttattgctaaaatatacagtaactgaagatagtaaaactgaaagataatttcgcaataggaatgatggttcctattagccatataaaggagtagtcaacatgggacaatcgtttaacgcaccatatgaagcgattggagaggaacttctatcgcaacttgttgatactttttatgagcgtgtctcgtctcatcccttgctgaaaccaatattcccaagtgatttgactgaaacggccagaaaacaaaagcaatttttaacccagtatttaggcgggcctcccctttacacagaagagcacggacatcccatgctcagggcaaggcatcttccctttccgattacggccgagagggctgatgcgtggttaagctgtatgagcagtgcgatggatcatgtcgggctagagggcgatattcgtgaatttctgtacgggcgtctggaattaacggccagacatatggtaaaccagtcggaagcggaggatcgatcatattgacgaattatcagcatgagcaatacttcgcccattgccacggacatccaaaaaaaccgctggaaatttacatgtttgttgaccctttatgtcctgaatgctggtcgctggaacccgccataaaaaaactaaaaatcagatacggacgtttttttacgctgcggatcattgtctccgcgagtatcacgtcgctgaataagcaaaaacggaaaaaacaccttcttgccgaagcttgggaaaaaatttcgaaccgttccgggatgccttgtgacggaagcctttggcttgagcaggaacagcctttgtcatcgccttaccttgccgcactcgcgttaaaagcggccgaactgcaaggaagaaaggccggcatcgtgtttcttcgcaacatgcaggaaagcctgtttgtctcaaagcagaatattacggatgaagacgttcttttagagattgccaaaaagacgaaattggatgtcgaagaattcaaacgcgacctccattcacaaagcgcagtcaaagcgcttcagtgcgatatgaaaatcgcggcggaaatggacgtcaccgtcaatccgacattgacgttctttaacagcctgcatgatgatgaagggctgaaggtgccaggcaactattcttatgacgtatacgaagaaatcttattcgaaatgctcggcgatgaaccgaagccttctgaaacgccgcctttggaatgtttcattgaatatttccggtttgtcgcatcgaaagaaattgcacttgtttatgatttaagtcttgaagaagttgaaaaagaaatgaaaaaactggcattcgccaaaaaggtcgccagagtggaagcaaagcacggtctgttttggaaatccctggccggcaccaaggaagatgtcacctgctatgatcattaaaaaaagctgattccttacggagccggctttttttgtgcaaataaagaaaccgcgccgggataagcgcggtttcatatgtcttaacgacaacaaaggggatgggagaaatttttcacggtcaaacaaaggggtaatgtttgtttgtgatcaatttcacatccttatcatatcaaatcttgtcgagttttgacaagccataagcttaatgttcatatttttgtcacaaaacataactgactgcttgttttcatagaatatatcaatgaaaacaaggagggacataaatgctccgcaccgtattgatcatcggaatgattgtgtttttcttctttttaaatctgctggctatgatgcatatgctgccgatttacattacatctcccctgctgtttctatccatattgtttgccctgtaccggctgaatcaccgaaaaacgtttaaaggattttaaaaagcctgcgcatctaatgcacaggcttttttgtattaggaaggattcactttcgaaaggagttcttccatttcattcagtttctcttcaaacattttgcaggcagcttcgatcggttcaggcgaagtcatatcgactcccgcttttttcaggatgtcgatcggatattctgagcttccggcttttaagaagttggtataacgctcaaccgcaggcttgccttcttttaagatctggctgctcagcgcttgagccgcactgtagcctgtcgcatattgatacacataataattgtaatagaaatgcggaattcttgaccattccaagctgatttcttcatcaattaccatgttgtctccgaaatactttttattcagatcataataaagcttgttcagcagttcaggcgttaacggctcgccttcttgcgctttcgtatgaatcagatgctcaaattcagcgaacatcgtctgtctgaagactgtgcctctgaaaccttcaagcatgtggttgagaagatacagacgctgtttttcatcttttaagctgttcagcatatattcaccgagcagcgcttcattggtcgtagaagcgacttcagcgacaaaaatgctgtagtttccgtacggatacggctgatattttctcgtatagtagctgtgcacggaatggccgaactcgtgaacgagcgtaaacagattattgacagtgtcgtgccagttcattaagatgtacggattcgtgccgtatgtaccggacgaataagcaccgctgcgttttcctttgttttcgtatacatcgacccagcggttttcaagtccttcttttaaaatagacgcgtattcatcgcctaacggagcaagccctttgagcatataatcttttgcttcctcatatgtgaccttcattcccgaatcttttacaagcggtgtgtacaggtcataattgtggacttcatcaaggccgagcacctttttccgcagatcaatgtaacggtgtaataacggaagatgtttattgatcgttttgataaggttatcataaacttcttcagggatgttgttattggataaagccgcttcccgtgctgatttgtattttttcacccgggcgtagaaattatcttttttcacagtgccactgagtgtagtcgccatcgtgtttttatactgtccgtatgttttatatacggctttaaaggcgtttttacggacttcccgatcgctgctttccagaaaattaataaagttgccgtgtgtgatttgagtttccttgccgttttcatcttttatcgacggaaacgtaatatcggcgttgtttaaaacactgaatgtattggaaggcgaagacagcgcttctgacgcttccgcaagcagggcctcttctttttcgctcagcacgtgcggacgctgttttgtaatttcttcaatggcatgggagtaaaccttaagctcttctttttccagaataaactgatgcagcttgtcctcctgaatcgccagaatttccggttcaatgtaagcagtcgcactggcggcctgagaatacagacttgcggctttgtcgttcagtccttggtagaaagaatttcccgtatcctgatctgagcgcatatgcgcgtatgcataaagttttcccagacggctcgtcacttcatcctgtgcggtaagcgccgcgtataaattatcggctgaatgagcaagcgtgcctttaaaggaagataaattcggaattaattctttaactgcttgaaattctttattccaggcctcatcactaggaaaaatatcctctagtctccatgtatgctctgcctttacttcacttctgtcaggcagctgtgctgctttattttcctcagtcatggtgatccccctcgttttctttatttcaagccaattgaaaaaatgattgtttctccaaaagcttgtgttgtgattatcttccggcttttcactgccttttgtcaaatcatatgcggcgtataagaccgagcataccaataatacaatgaaaaaccgaaaacaaaatgcttgtacgcccttcacattcagccaccaccttgacgttagggtgaacgaaacggagcattctcattccctaaaaaagagcaggtcccggcggtgcagctcttcggccgtttgagggcgcttgtgttgggttgaaggcatatatacttcattctcagtttcccttaaaaaatcctgcaaacataagaaatcagcatattgttttatcgccattctgatgagatcttcatgtgaatcataccgcatcctgatctcctgccgccggattttttgccgcaaataatgaaccatgccggataaccggatcggtgcgcctttttcacaaagctccgcaagccgcaagtataaatggccctgccacacaaaaacgggacttgcaaacacaaagcccgctgaaacggggataaacacttcagaaggcagaaaaggaaaggcaatctgatgccgttcgtaaaaaagttgccggataagacctgcatcttcagataaaaaccggccgctttttttgcggaagcctgctacggcgcgtccccaagaggaaaggttgacgctgtgccggccctccgggagagaaatgtctttcaggtttgctttatgaagagggatcatggttaagccggcataagaatagccggtgtaaaacggggtgatggaatgaagcttataaaaggagcggacatcggggcagtaaaacatcaaggaggaaaatgagttaacttcaaataattgccagtgataagcagaaagccggaaaaaatgcgcagccagccgttttaagcgttttgctccgatgatccagacaggccgatacccggcgtttttcaagccggccgtccggctctttaaagaatctgccgaaaggtttgcacattgaaattcaaaagccagccgctctgtgccgctttccgccgtcagatcaggccgctgtcgggcggaaggcagatacggctctaggctgacggcgcaaccttgtgtcttaagccagagaaaaagctgtctttttccttccagatgatattcgctttcgggttcggattctcccgggcacagcctgctttttttatgagcgaagtgcggcagtttttcccgtcccaatttaatatcaagctcactttcacaaacggggcagaaccagcgtttctttctcagctccgccgctttttcttttgaatagcttccggccagctgaatgagctgtccctcggcagtcaaagcactgaacatgctgcatcttctcctttcctgaatcttgatgtattcagcagaaagaaggcatactcctttttgcggatgagagccgttatgcaattttcagccgttcataaagtcattcagaacaaaaaaaaaccgatttctgctgagagaaatcggtttgttatgatgcaaagtgtttttttatcgtatataacgcatgatcagcgatcaccaattttccgtattcttcaagacggtgaatgctgactgatgattcttgcgcgtactccaacaggatgcttagctgattttcaacctcttcatcagtttgctcataaaaatctgcatataaataatatcggtcttcaaacgaatacagggtcgttttaattccgttaagattcaattttgatagcgagatgagatcctcaaaatcgtcgaaccgcaaagtgaactgaagcttttgctccttatcctcccgattctcggcctgctcttctttctggaaatcatcaagtagagcatcgagattttcatctgccggctcttgttttttatcttccgggatcggcagttcgagtttttgtccgtccttggaaagctgggcttttgttacgattatttccagtcctttgtccaatgcctgaacctgaatccaaagaggaccctcgacagcgaattcctcttcatcatgcacttcatccatgacttcccagaacagttcttcactgcgctcgcgattgtaccagatttcttctctgtcaaaaccgcgatcttcaatatcaccataagacatataaaattttactgtatgctcattaattctttctatttccattttgccaaccttcccttctttataagatgttgaagggacatctaagctcccgatgaatagtactttactacactttacccattccgtccacatcttaaccttatagaagacagcgcaaattctttatatttctattttatgataaaacagttataaaagaaataaaaaagcattttcacaccgaaaaacaggctttctcccggttctcatcataaatagcgcaccgcctcatatattagctgtacaagcaaccgatctataagcgaggtgttattatgccgcacgattacctgctgtcccttctgctcattatcggaattgacctcattctcggcggtgacaatgccgtcgtcatcgcgatggccagccggaatctggcgcataagcaaagacagcaagcgatcatcttcggaacgtttatcgcagtcgtcttaagaatcgttctgacgagcgccgcggtctatttattgaatgttccttttttacaatgcgcaggcggagtgtttttattgtatctcggctatcagcttctgatcgagaagaaagatgcgcagcatgtgaaaagcagttcttccctttggaaagccatccgcacaatcgttctggctgatatctttatgtcgcttgacaatgtcattgctgtagccggcgcttctcacggtgagcttacacttgttgtgatcgggctcttcatctcggtgccgatcatcatctggggcagcaagctcgttcatgccgctatggacaaaatgcctttattgatgtatgccgggagcggccttctcgcgtttaccggcggtgaaatgattgccggagacagcaaactgtcatttttcatggcagaacacagcgcaatacagatgatgctgccgattttgaccgtcgtttttgtcatactcgccagtatgatttatcaacagactgaaaaataacaaaaagcccaaaacgcgatggttttgggctttttccatgcttatcgtaagcttatatcagttggcaagacgctgtgcttctcttaattggaaagaacgcacttttcttggcaggaatcgtctgatttcgtcttcgttatagccgacttgcagacgtttttcatcaatgatgatcggacggcggagcagtcccggatgctcattgatcaaagtgtacaagtcttgaagaggcattgattcaacgtttacgttcagtttctggaatactttagaacgggtagagataatttcatccgtaccgtcttcagtcatacgcagaatctgcttgatctcatcaattgataacggctcggagaagatgtttctttcttcaaacggaatctcgtgctcttcaagccaagctcttgcttttctgcatgacgtacagctaggtgatgtgtataatgtaaccattaatcttcactcctctaattagtaggatgaacatgtttgtattctcaaattgaaatgactttaaaaaaggaatctttataggtattatactataaaaaagtaagtgtgaacagtctcctgagaaaaaaatgtgtcaatccggcaaatttacgttttgcggaattttttcattctcaattagctcagctgatcgaaaatgttttttcgtttgttctcatcaatgactttgagaacttcatccgttttttcgtatgattctccgtaccatttttcatctttataagtgtgaatggtttcatatgtctgtttcatcgcttcaaacatttcttcttctgactctgtcttaggtgaccagtacagaatctccattttgttcacttcattcgtagccaatgaccggcgccgatacccgattgactgcgcgtgcttgaaatgctctctttgataaaaacgcaaacgcttctgtgtatccgtgtcatcctcgtcaacaggctccacctcaagaagaatcggcttgtttttctttttcagcctgccgatcagcttgcttccgagaccttgacctctggatttctttgacacaaacaggtaatcaataaagataaaagagtcaaattccgcatacatcagcacgtggtactggccctcttctttatgataaacatcgctttgctccttcaacagagcttccatatgcgcttttgatttcatttcttcaatcggaaaatattcactcagcttctcgtaccagttcattcatttgctccttatgggttcgttgtcttcacacttttagatataccccatttccgattgtttaaacaatcttacatctattaagacgtgtgatcctttgacatggtttcaatttttttaaaatggtgtgtaatccacattttttgtataacggtttgccgcgtcccacaataaaaattcgtcaatcccttcatcatgcagcgcttttatctggtcttccacctggcttttcccgtattcttggtaatttccgctgccgagataagaagccgtgaagtcctgaagccacggacgtgacaccggcggatgtttcagtttggacagttttttattttccaccttcgcgtattctttgacgactttgtaaggctcaaggtccggtttatcaattccgaaatagcttgtccaatggctcgggtaaatcatggatgagatgacatcgacccgtactgaaatcttgctgaaattctggccgatccccggtgcttccggcagcgtcgcagaataaccgaaaatatcagccgacacatccgcaccgtacggtttgagttttcttttcgcataaccgacaaaatcagtgacggcgtgcacgcgtttctgcacattgctgtccgctgtttttccgtaatcgccgtgtccgtatgtcagttcgtcatcacgtttttcaaagccttcaggaaaacggacatagtcaaactgaatttcttgaaaccccatcttcgcggcttgttttgcaatctttacattgtaatcccatacttctttcataaacggattgacgaacgattctccgcggccgtttttccagacacttccgtttttttctttaaaggaccattccggcttttcgttcgcgagttcgctgtctttaaatacgacaatacgcgcaatcgggtagatctttttttcctccagttttttcatcatcttttttgggtctttgatgtacggcttggcgattttggcatactcagaatgaccgtccggcttaaaggtaagatttccgtggtcatccttcacatcgatcaccattgaattgagctccgttttgtccacaaagtctgtcagctcctgaaatttgctgcctcccgctgaatgccctgtaacgtaaatgccccgaaccttatcaggatgtgtaaaatgcagacctgacggataagcgaacctgtcatttgcttttggcagttctttttcagtcagcgccactttcacaagcggctgttcctctttcacagcggcttgtgcaggataagcgcctgcactgaaaaacagtcccgccgcaatggcgcataaaatagttctcatactgatctccccctttttttccattataggaaaacgggagcagccttaataaacttggatgtgcgcaaaaaaaatcctccaagactaagtcttgaaggatgatacttttattgataggttttaaattcagcttcagtgcacatgacaaagtgtcccggtttgacttcacgaaattccatcttttctccgttttggagctgatggattgacgggtcgtacttctttcgcgtgcgatttctttcatagtccggatcagggagcgggatggcggacagcaatgatttcgtgtaagggtgaagcgggttttcgtaaagctcatccgccggcgcaagctccaccagtttcccgaaatacataacgccgatgcggtcgctgatgtatttgaccattgatagatcatgggcgataaacaggtaagtgagtcctttttctttctgcaattctttcattaaattgacgacctgtgcctgaatggaaacgtcaagcgccgaaatcggttcgtccgcaatgataaactccggatcaaccgccaaagctctggcgattccgatacgctggcgctgtccgcccgaaaattcatgcggatagcggttggcgtgttctttatttaaaccgaccgtttccagcagttcgtgaacccgctgcatccgctcttttttcgtttttgccagacggtgaatatctatcccctcggcaataatgtcggcgactgtcattctcggatttaaagaagcgtacgggtcctggaaaatcatctgcattttccggttaaactccagcagtttcttgcgggatttttttccgtggacattttctccgttaaagagaacttcaccgccggttgcctcatacagccggataatactgcggcccgtcgttgatttaccgcagccagattccccgacaaggccgagcgtttcacctttataaatatcaaatgacaaatcatctacggcttttactgttcctttcggcgtaaaaaaatgctgttttaaatgtttgatttcgagcagtttctcagtcatttttttcaccttccttcattaaaacaggctgctgatacgtattcggcagctgacggattttagccttcaccgcttcaggcggctcgaccttaggcgcatcaggatgcagaagccatgatttcacaaaatgcgtatcagacactttatacatcggcggttcctgttcaaaatcaatcttcatcgcatatgaactgcgaagcgcaaatgcgtcccctttcggaggattcgtcagatcaggcggcgtacctggaatggccgtcagtttttcctggtcggtgctgtccaggctcggcattgaggcgagcagcccccatgtatacggatggcgcggatcataaaagatttcatccaccgtgcccgattcgaccacctgacccgcatacatgacggcgacccggtcagcgacattggcgacaacgccgagatcgtgcgtaataaaaatgatggatgtatcaattttcttttggagatctttcatcagctcaaggatctgagcctgaatcgtcacatcaagagctgttgtcggttcatcggcaattaacagtttcggatttgccgcgagcgccatcgcgatgacgacacgctgtctcataccgcctgaaaattcgtgcgggaattggccgatccgtttttcaggcatcggaattccgacgagatcaagcagttctacggcgcgttttttagccgcttcttttgagattttttcatgtttgaaaagcacttccgtaatttgtttgccgactttcattgtcgggttcagagaggtcatcgggtcttggaaaatcattccgatttcctttcctctgatggcctgcatttctttttcggacatcggtacgatatcgcgcccgtcaaaaagaatctgtcctcttttaaaatagcccggcggcatcgggatcagcttcataattgcttgggaggtcacactttttccggaacctgactctcctacgatcgccagcgtctctcctttattcaaatggaaattcacgccgcggattgcctgtacctctccgccgtatgttttaaatgaaatggctaagtcttttacttctagcaagcgtgtcactcatatcactccttatttgcgtaacttaggatccagcgcgtctcttaacccgtcgccgacaacgttaaagccgaacatcgccaggcagataaaaccggcagggaagaacagacgccaagggtaataggttaatgcaggcaatccgtctgaggccatcgttccccagctcgcaagcggcgcaggtacgccgagccccaaataacttaaaaacgcttctgtaaaaatcgccgtcggaaccgtcagtgtcatcgttacgaggatagatcccatcgcgttcgggacgatatgcttaaacaaaagccggccggttttagcgccgagtgtctgtgaagcaagcacatactcctgattctttaattgcagcacctgtccgcggacgattctcgccatgttgatccagcccgtgatcgtcatcgcgacgataatggtcagcaatcctttcggcaggacgaccataagcaaaataaccattaataatgaaggaacagcccacagaatgtcagcgatgcgcatcatcacttcatctgtgcgtccgccgcggaatccggaaatgctgccccagattacgccgattaataaatcaagcacggcagcggctacaccgataaagatggaaatccgcgcgcctacccatgtccggacgaatatgtcccttccaaggtcatctgtgccgaaccaatgatctttcgacggtgctttatcggcatttaatagattggtagtcgcataatcatatcttgaaaagacaggtgcaaaaatcgccataagaataataagaacgatcagtataaacccgaccatcgcaagcttattgctgcggaagcggagcatggcgtctttccagagggaaaggctttttttacttattttttcggcatcgccggcattagctgaagctggttcaaacatatttttaggaatgttctgcatggtctaggctcctttctttgctttagaaagcttgattctcggatcgattaatccgtacagcacgtctacaattaacacgcaaaaaagaaggattacgctgaagaacacggtaactcccataatgacggtataatcacggtttgtaatactgtttacaaaatgcgcccctaaaccgggaattccgaaaatagattcaatgatgaaacttccagttaaaatggatgccgccatcggccccatatatgtcacgacgggcaaaagcgcgtttcgaagcgcatggcgcacggtgactgacggacgggaaagtccttttgcttttgcagtccgtatgtaatcgctgtttaacacttcaatcatgcttgaacgggagagtctggcaatgaacgccatcggcatggaagcgagcgcaatggagggcagaaaggtgtatgcccaggattcccaccccgcgaccgggaacagttctaatttaattgagaaaatatattgcaaaatcgtcgccaatataaagctcggaactgagatcccaaagatcgttaagatcgcaatggtataatcctgccatttattatggtacagggcagccagcaccccgaaaagcacaccaaacgctaaagcgaggagaatagcttctgcaccgagagtgaatgagacggggaagcctgagttgattaaatcattaacactttggcctttatatttaaaagaaggtccgaagtcccacagcgccacagattttaagtagctgacatattgaacgaaaagaggcttgtccagaccatagtgttcgtttaagtttgcctcaatttcaggcggcagctttctttcgccggaaaatggtccgcccggcgctgcctgcattaagaagaaagtggcggtcacaatcacaaacagcgtgatgatcatgtaaatgaatcgtttaccgatatatttcagcaaggtgaacacctccatgttttttacaattttatactttatcagtaagaaaggtatatggggacatcctccccatataccttgggtcttttgttttcagaactgccttttattcaaaagaagcgtttctgaagtaaacttcacctgttccggttatgatcacatttttgaggtttttatcctgcacccaagtatctgtatagaaataaactggcgcgaccggcattgcgtcaataaagattttttctgcttttttcagctctgcgatacgtttatccggatccgtttcaagctgagactgattcagcagctttttaaactcagggtcttcccatccggtatcattgtttccgccttctttatcgcggaacaattcaaggaagttgatcgcgtcattgaaatcgccgagccagcccatacgtccgatttggtaatcctggctgtgcagcttgtcgatgtacacattccattctgagttatcaagctccactttgacacccaagttctttttccacatttcctgtacggcctgcgcgattttcgcatgcgcatcgtccgtattgaaggaaagtttgattgccggaaggtcagaggcactcttgacgcctaattccttcagtcctttatttaagaattcttttgctgttttgacgtcattgtctttgaaataaccttttgtgttatccttgaatcccttcattgacggcggtactgcagccatggccgggatttgttcgccctgcgtcacatttttcacgattgacgagcggtcgattgcataagcaagggctttacggatgttcacattgttaagcggcttcgcttctgtgttgaatttgtaccaatacacgcctgcgatcggttcaacgtgaagagatccgtcttttttcaatgtcggcagagattcagtcggaagctgaccgagcggcattcctgcccagttaagttcgcccgcctggaattttttcagttcggtgttgttattgttaatcatcaccatgttgattttcttcaatttcacagaatctttatcccaatattgatcgttcttttcgagcgtgatggaaccgctgtgtttccaagctgtcattttgaacggcccgtttgacacataattgtcgcccgcgtttgtgttccagtttttatgtttttccgcaattttcttgttgatcggcatatacgtatagaatgaagttaattgcaggaagtaaggtgtcgggttattcagttcaacttttaatgttttgtcgtttacggcttttacgcctacgtcatcaagctttcctttacctgtattggcagcttcagcgcctttgatgtagtagagctgataagcgtattgtgattcgttgttcgggtcaagcgcccatttccatgcatattcaaaatcctgcgcagtcacgggatcgccgttagaccatttcgcaccgtcacgaatcgtaaatgtataggtctttccgtctttgcttgtttcaattttagatgcagttccttcttcaggctcacctttggagtttacgcgtgtcaacccttcaaaggtctggcggattacgcctcccgaaacagaatcattcgctaaacccggatgcagtgagaacggctcggttttaatattgatattaagtgaagtctgtcctttggtgtcttttttaccatcgcctgatccgccgctgaatccgccgcacgcacttaacacaagcgagaagataagcatcaaacctacaatagaccaacgctttttcatgcactaaccccctaatcaaatttttcagcctttactactaaatactcagaaatatcagacaaaataacttaatatttttctaaactttaattgtgttccgtcttttctgattattttatgtaaagaagctgtaacaatagagtgaacaagttcattataatgaaatgaataatttattgcaatactattttctcaatttaaaatatttaaatttggtcagtttttctgtcaataaggtgatacacttctattgtttaaagcgtaacctaactaaattttttcattgtaatttccagttcatattgctttttacatataatattcgttatacgaaatgttgatatgcgttatcatttaggcattttcagttcttttcgggtatttccaggccgtaagcaaattggaaatacgcttgtattctcctgatgacatttggctataattgatttataatagatcaatcaaatacattttattgtgattgctatgatgaagagtagtacacatgttaacccgtttgaagagagcctgcggtgctgggagcaggtaacggaccatgcggaatggacttctgagcagctgaccgaacataagtaggcccagccggagcagcctccgttaccaacgtctcgagcgattccattttaatggaataatcagggtggcaccacggttcattcgtcccttttttctacgggaagaatgggctttttttattatgttttaagaaatgaggtaagttctatgaagaaaacgattttttcaggcattcagccgagcggttccgttaccctcggcaactacatcggcgcgatgaagcaatttgtcgatttgcagcatgactacaacggatacttctgtatcgtcgatcagcatgcgatcacggttccgcaggatcggcttgagctgcggaagaacatccgcaatctcgcggctctatacgtggccgtcgggcttgatcccgagaaagcgaccctctttatccagtcagaggttcccgctcatgcccaagcggggtggatgctccaatgcgtcgcatatatcggcgagcttgagcggatgacgcaatttaaagataagtcaaagggcaaagaagccgtcgtatcaggactgctaacatacccgccgctgatggccggtgatattttactgtacggaacggatcttgttcccgtcggagaagaccaaaaacagcatcttgaactgacccgcaacctggcggaacgcttcaataaaaaatacaatgacatcttcacgattcctgaggtgaaaatccctgaatcaggcgcgcgcatcatgtcactggctgatccgctcaaaaaaatgagcaaatcagatccgaaccagaaagcatacatcacgctgcttgatgagccaaagcagctcgaaaagaaaatcaagagcgctgtcactgattccgaaggcattgtaaagtatgataaagaaaacaaaccgggcgtctctaatcttttgacgatctattctattttaggaaacacatcaattgaagaattagaggccaaatatgaaggaaaagggtacggtgaattcaaaagcgatttagccgaagtcgttatcggcgcactgacaccgatccaagagcgctatcgtgaattaattgagagcgacgagcttgaccgcattctcgacgaaggagcggcgcgcgctaacaaaacggccggcaaaatggtgaaaaaaatggaaaacgccatgggtctcgggcggaaaagaagataaagaaaagaggcgggataacccccgcctcttttttttagttcacttttgattcctgttccatttcccaaagcttttcgaaaaacggctgtcctttaatcaaattctcacagaacgcgagatgcttgtctgaccagccttcaattgtttcattgtaaagcatgtcccaaatctcctcaaagctcatccgtttgatctgctcgtacatatgcggattccattccgtataccaatacacaatctccgcgcggtttttcagccctttcagctgatcaagcgccataaacatcagctgcttgatctgccgttcttttctcgtcaggcctctgacatgctccggcgccagtgataaaatgtgatattcctttgaagactccaattgcgccggctcaaattgaaacgattccggctctacatccttgaccatttcataaacaagctgctcctgtctcggaatcaggcggctctttctgaccgggatggtatatccgatcgtatccacggcaatgatgccgatcccgtctgtcacgacaaaacagtactcaagcttcgtccgctcatgattttttcgcacgtatgacttttgatgcacttgatcaagcagctctttcggaagctctgataagtcgttttctatgtaatgaaataatactgacggcactctgagcagcggcgtctgatccaaaagctcaaccgtgtcttccttccgccattcgtgaaaatggcagacattgtagccattctcttccccttcaaaccaattgacccacacatcatgaagaaataacatattcgacccctcactttataaaaactgttgtccacagtataggcaagggaaagataaattattccatttcgatatgagatttccgcaatacaggactggatttctgcctgtaacgcaacaaaaaaatctcccgtttcgtccgggagatcatttcacatttttcggatcaagcgcatcacgcagcccgtctccgacaaagttgaagcacaatacggtaagaaggatcagcaatcccgggaataacgggtaccaccaagcttgaatcataagcgtaaagttttgcgcatcctgaagcatattgccccagcttgcgatcggaggctgtatcccgaaaccgaggtaacttaatgtagactctgccaaaataaccgttcccacttttaatgtggctgagacaattatcggtcccagcgcattcggcaatatatgagaaaaaatgatatgatgattttttgtaccgatcgtctttgcagccagtacaaactctctggaacgaagcgataaaaactccccccggacaaggcgcgctgttgttgtccagcctgtaagggagaaaattaaaattaatttatccattccgggctgaaaaatcgtaacaagtgtaataagcaaaaatatatcaggtatagatagtacgatatcaacagttctcatgagaatggcatcgacaatccccttaaaatatccggcaacagctccgacaactgtcccgatagtaatcgcaccgatcacagaagcgaatccgacaagcaaggaaacccgcgccccgtacagaaccctcgtaaagatatctcttccgaatttatcagttcccattagatgttttaaactcggcggtttcaaacggttgataagagattgactctctggagagtaaggagcgattaccgaagcgaataaggcagacaagatgatgatggttaatataacggctccgatgacagcaagtttattttgaaagaacttttcgaaaaaaatcttagtcattgtttccggtttggattgaatattttcctttaattttatttcactggggggtgtgccggtatttggctgtaacatttgatctctcacctctctttgttaatattcaatgcggggatcaaccaacgcatataagatgtctgcaattaaattccccaccacaaccaaaacagctgaaatgaccgtcatggccatgataaccggataatctcgtgaaaaggctgaatcaataaacaatttgccgagacccggccaagtaaaaatctgttctaccactaccgctcccccgataaatgacggtatcatcagaccaaaaatagtgataaccggaagaagtccgtttctcaaaccgtgtttaaaaatcactttattatcccgaaatcctttcgcacgcgccgtacgtatataatcctgctttaacacatcaagcatactggatcttgtatatctcgttattccagccatgtctgccgtggcgagcacaaaagcaggcagaattaagtgatgcaaacggtcaaatatgttgaagtcagcatttaaagtgcctactccgccagtgggaaaccatcccagatttacagataagaccatgattaaaatcaaaccgaaccaaaaattcggaatggcaagccctaaaaatgaagtaacagttatcccataatccaattttgaataaggccgtttcgccgacagaacaccaaatggaatagagataagaagagcgacaagggttgaaaaaagcataagcacaatcgtattcggtaagcgggataagataagttcagaaacaggagtgcctttctttacgatagaagtcccgaaatccccttggagcatattccccagccatttcacatattgaacgggttccggatcgttcaacccgtatttttcaatgaatttcgccctgtccgcttgactgattgtagggtccatcataagtgacatcggatctccgggcgctgctttcatgatggcaaatgataaaatcgtaatgcctaagagaatcggcaaggacattaatgttcgccgtaaaatatatgtaaccatgttcttgtcccctttttaaataggataagagaggaaaggaacttccttccctctcaagggcttctgctatttttggtccagccaccatttttcaatattgtacaagtcatttttagggtggaatacatagccttgtaaattattcggcatcgctctgtgataattgtaatagaataagaagctgtacggctgatcttccgcaatcaatttgtaaatctcttcatatttcttttggtattcttttctgtcggtaattgacttcgcctcttcaagaagcttatcgactttcggatttttataccagatattattcagcccgtttttagattggcttgaatggaagatggagaactgatccgggaacgttgcaagactccatccgagaagaagtgcgtcataatcccaattaggggcactggtctgttcaattaacgcactgaattcaacaatccgcggcttagcctcaattcccacttcttttaattgctgctgaacgacaactgctaaatcttcgcgaattttattgccttgattcgttttaatttcaaaagagaattttttcccatctttgtcaaggtagccgtcaccgtcatgatcttcccatccggcttcttttaacagctgttttgcttttttcggattataatcaaatgtcggcactttagacttcggataattccatgacagcggactctcaggaacattcgctaccttgccgtctccattcagcacttgatccaccattgcctgcctgtcaagagcgtaagtcaatgcctggcgcacttttttatccttaaagagctcttttttctcattccagccgatatagctgtagtttaaaccaaggtcagatttgaccttcacatttccaaacgttttaaccgaatcaaaatcagtgccaggcacaacgaagaaatcaatatctcccgcttttaactgggccacggcagcgttagaatcaggaattgttttcactgtcactgtatcgagataaggtctgcctccaaagtaatcatcgtttgctttcagtttgacatactcgccctttttccactcagcaaacttaaacggaccggagccgattggatttttacggttaaattcattctctcccaggtcggcaaccggaaccttacccaaaatatgtttaggtaaaatgccgtaactgtcgagaacgacattatagaaataggcatcttttttcttcattttaaactgaatttcatattttccttttttcgttacggatttaagtgactcaaaacctgagccccgctcaccgttgtaatctttgttaagaggaatactgtaggtgaaaactacatcatcggctgtgagctcttttccatcatggaatttaacgccttttttaagttttacgttatacgttaatcccccgtcagcttctgttactttttcagccagcgacggcttgacgttcaatttttcatcggtttctaataatgtgctgtaaatcattccttcaatatcggaacttgcaacatcagtggagtaaagaggattaaaaagtgttggttccccagttgacccgacaaccaaatctccgcctttttgcggctttcctgccggtttggattcggtgcttgtggattttgaaccggagcatgctgacaggaagatggcgagcgtcataaaaacactaagcatcatcagtgcggttttacgtaatttcatatcaattccccctttgtgatatatatgcggcaaacaggttatgtaatccggcataccccctctcgatgcttgccttttcaggcgtataaatggcaggaaacgtaatggccgggagcggcttcctcaaatgccgggacttgttccttgcagatcggtttggccatcgggcatcgcgtgtggaacacgcatcctttcggcgggtttgccgggctcggcagttctcctttcaggataattcgttcccgcttgacggcgtctttttttctcgtcacaggcactgaagacaaaagcgcttgcgtataaggatgaagcggattgtcgtacagctcgtgtttatcggtcagctccatcattttccccagatacatgacgccgactctgtcactgatatggcggacaacactcaaatcatgagaaataaacaaataggtcagattgaattcttcctgcagctcctccatcagattgatgacttgggcctgaatggagacatcgagcgcggaaacgggttcatccgcgataatcagctcgggattcaatgtcaaagcccgcgcgatcccgatccgctgacgctgccctccggaaaattcgtgcggatagcggtttgcaaagctcggatgaagaccgactttcgccagcagctcctccactttctcgttccgctcgcgcatgctgtacatatggtgagtctgtaacggttctttaataatggagcggagcgtttttctcggattaagcgatgcaaagggatcttggaagaccatctggatgtttttccggacgctttttctcagcttttcttcagataagccggagatatcctgacctttaaaaagaatccggccgtctgtcggcttgtatagacggatcatcgttcttcccgcagttgatttgccgcatcctgattcaccgacgatgccgagcgtctccccgcgcttcagtgagaatgaaacgccgtcaacagcctttatgtctccgacttttctttgaaaaaaaccggagcggatcgggaaatatttttttacgtctttcagctctaaaatcgtttcttggctcacagctgtcattttgattgggcaccctcttcctcatataaaaaacatcttacagaacggccgctttcatgtgtcacaagctctggctgccccgttttgcatttgtccatcgcttttgaacacctcggggcgaatcggcagccttccggaagattatccggtgtcgggacactgcctttgatcgcttttaatgtatcaatctctccgtctatcaccggtatggagtttaacagcccttccgtgtacggatggagagggtttaaaaataagtcttccacactcgcgctctctacgacttgtccgcagtacattacaatcaccctgtctgcagcttctgaaacgacgcctaaatcgtgagtgataagcagaatggaagtatcgaatttattgcagaggtctttcatcagctccaatacttgggcttgtatcgtcacatcaagcgccgttgtcggttcatcggcgatcaaaagtttcggattgcagctgagcgcaatggcgatcatcaccctctgtctcatccctccggacagacggtgcggatattctttcatcacttgttccgctctggagaatccgacgagctcaagaagctcaacggcctttttggccgcttcttttttactcatctttttatggtattcaagcacttcggtaatttgttccccgatggtcagcaccgggttcagggaagtcatgggttcctgaaagatcatagagacgtcatttccgcggattttgcaatattcgttttctgtgaaggaggccaggtccctgccttcaagcttaatcgagccgtccataatttttccgcccgatccttggacaagtcccataatagaaagcgaggtgatgcttttgcccgagccggattctcctacaagtgcgacggtttcgcctttgttaatgtgaaaatcaaccccgtcgactgcgggaatcggctgtttctttctgaaaaaataggtctttaaattattcacttctaatagtgtgctcatgatacgcccctttctcattccgctgcagcagagggaaacatacgtttcgctatcacaaaatatagaatagtcgaaaaattttatagttgtatattattacatcattattacaaaagcaagaattttttaggataaatgtaatatccttaaataatttccattcttttaatcttttaaagcgttgcttccagaaaggtttttgaaggtgtggccaatgcttcttttactgttttttgatggtcggttaaatatttttttactatattgaatccgacggcatacccaagcattgaggggaagtatccttttccgtataacagctgggaaaacatcctgttgtctctcgttaatctgaggttcggcttgactcttttttcaaacagaaaatcaagctgctcaggcgtatagtaggacgtccattccgccgtaagacttgagccgaagcgctcatatacagcatattctgccagcccctccatcatgattgtatcaagtaatgtctcatctttttcgtccattgtcacatgctctaaccggcagacgtgattatattcatgtgtcataagggcggagacagctgaattggagatatccgacgataaaaagagaaacattttgtcccggaaggcaagacctgattttgacccgaattccatacgtattttccggttccgttcatcgacgggcaaaacaacgatcggcacgtccggcccgctccacttctcctttaaataagcttcctccttttggatatggctgtagcatcccctttctttcagccgtttactggtcacgacaccgtccttcagatggcggaacatgccgtggttttgaagcaccgcaagtatcgatttccattctttcttttcggcccctgaaaaaagcggcaaaaggtgcggggccaaatcattgatggatgccgccttttccatccattgatatgtcagcttgacgctcataccggttcgcctcctcttgttgttatcatatgcacgcacaaaaaaaccggccacctttttcaggcagccggtcaaaaactgtattattgatattttttaaagatcaaagtggcattatgtccgccgaatccgagcgagttgctgagtacgatgtttacatcctgctcgcgcgctttgtccggtacataatctaaatcacactcttcatcaggtgtttcgatgttaattgtcggcgggatgatcccgtctttaatcgccatgacggagaagattgcttcaattcctccggcagcgcctaacaaatgacctgtcattgattttgtcgaactgacggcaagcttgtacgcatgatcaccgaaaaccgtcttaatggcttttgtctcgtatttgtcattgtagtacgtgcttgttccgtgagcgttgatgtaatcaatttcttcaggcttgatgcccgcgtctttgattgcttcctgcatcgctctcgcaccgccttccccgtcttgggcaggcgcggtaatgtggtaagcatcaccagttgagccgtagccgacaatttctccgtagattttcgcaccgcgggcaagcgcatgctcaagctcttcaagcacgacgatccccgcgccttctcccatgacaaagccgtcacggtttttatcaaacgggcggcttgccgttttcggatcaggatttgtagaaagggctttgtttgcgctgaagcccgcaaatgacattcttgtcagcggcgcttccgttccgcccgaaatcatcgcatcggcatcgccgcgctgaatgactttaaacgcgtcaccgatagagttcgttcccgtcgcgcatgccgtcaccgtacaagagttgactccttttgctccgagagcgattgagatttggcctgtcgccatatccggaatcatcatcggcacaaagaacgggctgacccttctcggaccttttgtcaggaagatttcgaattgggattcaagcgtttcaaggccgccgattccggacccgacccaaacgccgactctcggcgcgatctcttctgtaatgttcagaccggcatcttcaacggccattttcgcggctacgacagcatattgagtgaagcggtccatttttctcgcttcttttttatccatgtagttttcaacattgaaatctttcagctcagcagctactttcgccggatactcgtccgattccacacgtgtgatcggtccgattccggatacgccgctgattgcatttttccagcttgtttcggcatcattgccaagcggagacagggctccaagccctgtaacgactactctttttttactcatcttgtgtgcacctcaccttttttctatcgtccccagcgcattgctatggcgccccatgtcaatcctccgccgaaaccgaccatgacgatgacatcgccgtctttaattttacctgcttccagttcctctactaatgaaatcggaatggatgctgcggatgtgtttccatatttatgaactgttttagacatcttttcaaccggaagctccaaacgctcccgtgccgcttccatgatgcggatgtttgcctgatggggaatcaaaaagtctacatcctctttggagaggccggctttttcaattacatttacactcgattcacccatttgccggacggcgaatttgaatacttctcttccatgcatgattgtatgccctttttcatctaagtacaagtgctgaccgcctgtaccgtctgctccgagctcaaatgacagtatgcctctgtcgtcgctgaccggtccgatgaccgccgctccggctccgtctccgaacagaacagccgtattgcggtcttcccagtctgtaatgcttgaaagcttttcaacgccgacgacgaggacatgtttgtatgtttgtgattcaatgaattgtttggcggttacgataccgtacataaatcccgcacatgcggcgctgatatccatcgcgcacgcttttttagccccgagcttttcttgtatcatacaggaaacggtagggaaagactgatcgggagtgaccgtggccacgaggatcatatcaagatcctcagcggaaatgcccgcctgatcaagcgctttttgcgcagcctcggcagccatgccggatgagtacatatcttcagcggcgattcttctttcttctatacctgttctcgtacgaatccactcgtccgatgtatctaccatttgttcaagatcatgatttgtcagcactttttccggaatgtaacggccgacaccaagaattccagctttcataggaaagactcctttttataatgaatttataactaattagttatgatcaattattagtatcaggtactaattctaccctattttttttctgttggcaatatattcgtctaaactatcggctcttgatcctcatagaataaacggaagacgaaaggaggctttactatggatattttctctaagatgatgttcggcaactccgaggagcgggataaagaaccggaagaaaatccggagcagcctcaggctgaaaacgaagagcagatcgattacaaccacgtgatgaatcagctgggctccatcatgaactccctggatcaattaaagcctgtatttaaagacctcgggccgatggtgtccgccataaagaaaaaaatcatgtgaaaagccacttcatgaaaaagtggctctctttatttattcagctccccggcatcagatctgccaagctcatacgcttccgccatgaccgatgtaaacaggttcatgaacggctgaatcatttccatagacagatcaatgcctgatttctcaagctccgcctttgcttccggcaggtatttcatcgcgatctgcataaattcaagagacttttcatgctgcatgtgtatccacctctattcatttgacggcagttcatttgtttggttatacgtttttacaaggtctgagattttgtcttgaaaggctttgtccaccaaagggctgaacgtccccatttcaacgactccttccctgaaatcgaagttgtgatctccgctcttgagcgtacctttattatattgctcggcgattaatgtataagctttgtctacattttgcacggtgcttgtcagcaccgtgtttttgccgagatacgattgctcggcgacatagccgatggcgtaaagcccgtcttttttgatttgctgaatgacaggaacattatacccgtctccggccggatacacaacatccgtgccttccgcttttaacttctcgtaaagatgcagcgcttcattgccgttatcccagtggtccgtaaattcagtattgacggtgatatcgggattttcgtatttcgcccctttgataaagccgtctacttcaggctgccataagaacgaggcgatgacgccgacctcattggtttttgacatatgggcagccgtcattcccccgaaaaagcccatcgcttctcccatgagatgaacgcttgtgacattatcgtttttcgccgttccgtttgcgacgacgaactccatatcgggataatccttgctgatcatattgaagatttcctcgtattcatttccgtgcccgtataaaagattgactccttttttatgcaaatcatctatcgcttttaaaatatcttcatcagatctgatattttctttataataaacgtcaacgttaaattcagattgtatcgctaataaacctttgtaaccttttgtgccccataccaggtcactgatggtatcgggaaaaagcattccgaccttctcaatttttcctttaaacggagtttgtgcgcacccgctcaataaaaggaggacagaaaagatcatgacaagcctggtgatcaagccgtgttcaaccccttttcaaactcataacatgtataattaattgacatacgtttattgtagcggtaatgcacataacatggaaggtatttcttaaaaattgtcgaatattgatgaaaattgtcttttccactcttgaattttcttttccgcttccgttttttgcgttttttcttttatttccagggtaataatctgattttcatcctctgtgccgtcagtttcaagcttattcatcagaccgcagaccgcgtcttctaaaaagaccctgttttcgccgttttctttcgcttccgtccacgggccgtaaagaggcggaaggataatcgctttagccgtgtcccgctgaccgtttttttcccagtcttcgtgatcctcactgtaaacaatccaatataaaggctccttcctgtcttcaggcagacacccgctcccatattgaacacagattcgatcgtattccttttcgccgatttcatctattatttgaaaaagcccgtttctcccgagccacattaaacgttcttctaaatacagctgcctcgttttgtcctccggttcatccaaaatgacatcaacatgcacaccctcatccatcatccgttcgcataatgaaaggcctagaaattcatctgctccaatgatcagcgctgtcttcatcacatctgccgcctttccggtttttcattcaaacaagcaaaacagccctctgaaaagagatggcttttgtattctattcattacaggtctttttcatgactgcggaaaaaccggcagatggctctgtacatccgcgctggattctcaagcaggtgatacgtgatagcggtcttacttccggtcttttcccgggcttctttatatacgttcgcatgcagggtatacgggtacggcgctccggtcgttctttgccatatatgtaccggcgcgcaggtgctgcatccggtgatggtctgatagttcagtgagcttgcctctttttcagaaacaccgaagctttgagccgtttctctcagaaactgtttataaaaaaacttattttctttctctgattcgaaatgggcttgaagatcaagacaaggatctaacattgcggctgaacggatatgctcgggcgaagatcgcagcaattgatcggcgatgagggcgcccatgccttctgcgagcaagtgtatcttcggattgagggtttcttgtttcagcacataatgaatcagctgcctggcgtaagcggcggctttttccgatccccagtgccttccgtataaattgctgttgaagatcgtataacctctgtcacgcagcgtatttaacagctggtttctcccttcatgttcgagccaaaagcttgaatccccgctgacaaagtgagttctgtctccaagaataaagatacagaagccgttcggccgatacggcagatggatgacgttcagctcagatccgagttggaaaaatctttccgttatccccatgcctttccgcctccttttactcctagtctctctattgactatcatatgtaagacgaatgaaaacggatcagttaaacccctatttgcttctatgttttggctattataccaagtgcggggaccgtattttccatcagacagccgaacttgcgggagaaagtcagctccgggcgcgctttttgatgcgaaaatgaccttccgcccgcgctttatgtatggtatgatacaacgtagaataaaatgaaggacgaggtggaaacgtgcggtttattatcagttttatttggacgttccttttatcacatatggcctgttatttgatcgcctccatgaacagcgcggcatacaatttcaagcaatcatccgttattgcagtggttattgcggtgcttgtctttgttcttgcggagatcatgcctgtcaaacaggatgcaagccagcattcataaaagaactaaaaaacctgcttttcagcaggtttttttgtattcacggttttcgctgatacgtccacagtctgttgtgatttgaagtctcgggaaacatttctcccgttgtgagcttgattttttgcggatttttgaccatgcttcccgtttcgccgatttcaacgtacacaccgttattcggcgctttttgtcccgggcggaattgatgctgctgtcccatgtcatttcctcctttttctttttcatgtagtatgcgcttgtatggaggaaaatattaaaaagccgctgaatgaggttcagcggcttttttgttaatcctgtttgtaaagaagagctttcaggagcgctttttgcgcgtgaagccggttttccgcctgctggaataccgccgaattcggaccgtcgataatgtcggacgtgacctcttcctcccgatgcgcgggcaggcaatgcaaaaatgtatagtcaggtttggcgagactgacgagtgaggcgttgacttgataaggggcaaacacgctcagccgctgctgcgtctcttcctcctgccccatgctcgtgaagacgtcggagtaaatcacgtcggcatcccgcaccgcttcctgcggattatcggtcagggtgatcttcgttccggaaacagccgcggcttctttcgcggcatttaccgcctcttcctcaacttcatagcctttcggcgaagcaaccgcaacgtcacagcccatttttgcgcagccgatcatgagtgaatgcgccacattatttccgtcaccgatataggcgacttttactcctttcagctttccttttatttcttgtatcgtcaacagatccgcgagagcctgacacggatggtaccggtcggtcagcccgtttatgacgggaatgtctgcatgctcggcaagctcttcgactttttcatgcgcgaaggtgcggatcataatggcatcaacgaatccggacagcaccttcgccgtatctgcgaccgtctctccccggccaagctgcaggtcactgcttgaaagaaaaagtccggttccgccgagctgggccattcccgcttcaaatgacacacgcgtgcgggtcgaagatttttcaaaaatcatcgccaatgttttcccttggaaaatcggctgtatcggatgttgttttaacaatgaagcttctgtaagaagcgcgttgatgtctgacgggctgacatcttttaaggaaagaaaatctttgccgtacaaatgggttaatgtgtgttccgcttttactgtgtgcatgattccacttccttttgataaagatctttgagcgatacaggctgaggtgtgccggagccgcttgccaaaaatgctttgacggtttccagttcagtaaagaccgtcacaccgtgcgtcatggcttctatccgctgtttgcgcgcttcttctgagtgattgaaattgatatgaaccgctttatcccttcggtctgcccaagcctgaaaagagtcttggcatacggtgaatcccgcttcttgggtctgctgtgccagtttttcatctccgccttccagatagacgctgccttttttctcccagacgtgcgcatagatttttttcagggcgctttctgcgtcaaacgcgacacacatgccttctccggtcgacttcatttccgggccgggctttacgtccacgtcctgaatggcgtgagaagaaaataccgggaatttcactgccgttccgtgctgattttgtatcacgggcttgatttctttaagggaagctccggccagcagtctggcggcaagcggaatcatcgggactcccataaccttagacactacaggaaccgttcggcttgcccgcggattcacttcaagaacgagaatatctcccttttcatcaattacaaactggatgttcatgatgcctttgaatgccagttttaccgcaattttttcggcagcctcttttaactcccgctgcatttcaggggtgacagaaggccccggaagaatcgcaaaactgtcgcctgaatggacgcctgcccgttcgatatgctctgtgcaggtcggcacaaatacttcatgtccgtcagaaatcagatcgatctccacttcttttcctgtaatgtactggtcgatcaaaatcgggtacggcatgcccgcttcgttttcaagcagttctgaaatttgcgcttctgactcaacgattatcatgcccatccctccgatgacataagacggacggatcagcacgggatagccgatacggcttgctttttccgcggcttcttctttcgtataagctgtttcccctttggcatgtttcagatccagatcatcaagcagtttataaaacagatcccgatcctccagcgcatcaagggtttcaaaggatgttccgagcagcggaatgcccgctttttccagcggttcagcagcattgatagcggtctgtcccccaaactggacgatggcaaaatcaatgttttcatgttccgccacgtttaaaatatgctctgtcgtcagcggttcaaaatagagccggtcggcaatttcgtaatccgtgcttactgtttccggattgttattgatcataatcgtttcatatccgagcttttgcagggtcaggacgccgtgaacggcactgtaatcaaattccactccctgcccgatgcggatcgggcctgagccgatgataagcgcgcgttttttctcttttcggctgatatctccgtcgctttccccgagataggtggagtagaaataattcgtcttggcatcaaattcagcggcgcatgtatctacgattttaaacgacgggacgatgcccgatttctttctgagagcgcggatgtcttcttccgtttttcccgtaagagatgcgatcatgacgtccgtgaagccctttaccttcgcctgttttaaaagcgggacagacaggttatctccttcttccatcagcttgttttccaatgtgatgatattccggaacacatggagaaaaaacgggtcaattttcgtttcggcatgaatgtcttctattgttacaccgcggcttaacagttccatgacgacgaagaatctccggtcatccggcgttaccgctaattcccgcagctgattgagcgtacagccgccgagttcaggcaggcgggtgccgatcgttttcagctcaagggaggccgccgctttttgaatggccgcttccatatttctttcgatcgccatgacctctcccgtggctttcatcttcgttccgagcgtgcggtcggcatatttaaatttatcaaacggccagcgcgggaatttgacgatgacataatcaagcgccggttcaaagcttgcataggtagagcctgtcagcggatttttcagttcatcaagcgtatagccgacggcaagtttcgccgccattttggcaatcggatagccggtcgcttttgacgcgagggctgatgagcggctgacacgcgggttcacttcaatgacatagtactgtttgctgaacggatccagcgcaaattgaatgttgcagccgccgaccacatccagcgccgaaataatcgccaggcttgccgaacgaagcatctgatattcctcatcggttaacgtctgggacggtgcaacgacgatagagtctcctgtatgcacgccgacgggatcgatgttttccatgttgcagacggtaatgcatgtatgatttttgtcgcgcatgacctcgtattcgatttctttaaaaccggcgatgcttttttcgacgaggcattggctgatcgggcttgctaacagcgcctgtttaatcagcgtctgaaacgcttctttcgttttcgcgattccgcctccctttccgcctaacgtatacgccggtcttagaatgaccggaaacccgatagactcagcgaagcggagggcgtcttcttcgttgtcgacgatttcgctttccggaacgggctggtcaagctctttcatcagggcgcggaactgctcccggtcttcgcctttttgaatggtttccaccgatgttcctaaaagcttgacgtgatgcttcttcagcacgcctgcttcttcaagcttaacggctaaattcagcgcggtctgacctcctaaattggcaagcagaccgtccggtttttctttttcaataatggcctcgatgctttcgggtgtaagcggttcaaaataaatttcatcagcaaacgcctcatccgtcataatcgttgccgggttgttgttgacgagaataacacggtatccttcttctttcagagccatgcagccctgtgttcctgaataatcgaattcagccgcctggccgatgatgatcgggccggagccgatgaccaatatgctggaaatggttgtatctttaggcatgagcgatttctctccttgctggtatcactttctctagaaattcatcaaatatccactcgctctcagccggtccgggatgagcttcagggtggaactgaacgcttaatacgggaaggcgtttgtgaatgagcccttccactgatgtgtcattgacatgatggaacctgatcgacagctcattttcgtcaattgatgattcatcgacgacatagctgtggttctggcttgtcataaacacccgtttcgttttccggtcaatgacgggatggttggcacccctgtgaccgaacggcagcttatacgtattccctccgaaagcgagagcaatcagctgatgtccgagacaaatgccgagtgcggggaaagcattcagtaaagccttaatccgggtcatgtacggagcaatcgctttcgggtccccaggcccgtttgaaagcacgattccgtcaggctgaatgtcataaacggcgttcatctggtgatacggaatgaccgttactttacagccgcgcttgacaagcgacgaagcgattgattttttaaaaccgaaatcaatcagcgcaatatgccgttctccgtcccccattgaggtgatctcttcggcctgcgccagctcagccgggttttctgttccgcatgccgccggaacctctcctgttgttgatacggcagcgttcatcgtgccgccggagcggatggttttgacgacggcccgtgtgtccacttcggttaagagcgggatgttccatttatttaaatactctctcaggcttgagactgcttcatggtgagaaaaatgttcacacgcttcatacacgacaacagccttgacttgagggatcttactttcaagatctttttcattaattccgtagtttccgatcagcggatacgtaaaaacgatgatctggcccttatatgacgggtctgtaagcacttcctggtagcccgtcattccggtgaaaaaaaccgcttcgccaacgcagcatgcctctttttcaagttcaccgccgaatgatgttccgtcttccaatactaaatagcctttcatctaaagcccacctcttgatgaataattaattaaaaatatgaatttttataccttgataacaaaaaaattatcgtttcactgcggaattcgcttcgatcgctgctttcagcatgctgacggccgacagtatttcttcttcagaaaccgtaagcggcggaagcagcctgatgacattcggtccggccggaagcacgagaagtccgcgttcctgcagatctccgatgatgccggaaacggggcctgcgcattcaatgccgattaataacccttttccgcggatgttttttacaaaaggcactgtcagctcacgtttcagctgcgcttttaaaaaagcacctttgtccgccgcagcctggagaaagtccggctgaaacacaatgtccaaggtcgcattcacagctgccatggcaagcttattgccgccgaaagtcgtgccgtgcgtacccggtgtgaaggcttcgccaagcttctttttgccgatcacggctccgacgggaaaaccgtttccaagccctttcgcaacagtgataatgtccggagagatgccgaaatgctcatagccgaatgccttgcccgtccggccgattccggtttgaatctcatctgcgataagcagcgcctttctgtcttggcaaaatgtctgtaatgctttgatgaattccggatcggcgggatgaactcccccttcaccctgcaccgtctcaaacatgacggcggcgatgtcatcctcgtttgaaagcgtgctgaatgccgacggatcattaaacggcagatagtgaaaaccttgaagcatcggtccgaaaccggttttgattttgtcttgtccggtggcggccattcccgcatatgtccgtccgtgaaaagattgatggaatgtcacgatttttgtttttcccgttgctttacgggcaagcttaatggcgccttcattcgcttcggctccgctgttgcagaagaaaacaagatcccccgcgctatgttcagcaagctttgccgcggctttttcctgaaggtcattttcaaacagattggaaacgtgccatacgctgtcaagctgttgtttgaccgcttctgtcaccgcgtcatggcaatggccgagattggaaacggcgataccctgaataaaatccagatacgtttttccgttttcatcctctgcgattgtccctttcgcttttttgatatcgataggccagcggctgtaggtttgaaataagctgctcatgacacgctctccttttccttgacgatttttgttccttgaaaggcttgatcagtgaaaaacgctccttttccgttcacaatcatcacttccgccacatcttcactcagtgccgataatgccgacttcaccttcggaatcatccctcccgcaatgacgccgtcatcgatgagggcttgaatctcttgcggcgtcagagtatccagccggttctctccgtccataattccttcgacatccgtgacaaataaaagtttatcggcgtgtaaggcggaagcgacggccgaagccgcggcgtctgcatttacgttcagcgttttgaaatcacttgtcatggaaagcggagcgataacgggaatgatgccttctttcattaatgctttaataatggccggatcggtttttttgatttcgcccacttctccgtatttatcttgatcaagataggatgcttgaaggagtccgccgtcctttcctgagattcccgctgctttcagcccgtttttcgccagttcggccacgaaaaatttattgaccgaccctgacaaaaccatttccgctgtctcaagcaccggtttggtcgttttccgctgcccatcgacaaattccgtttctatctgcaatgttttcagcatttgtgaaatttccgggccgcccccatgcacgacggcaatgttccagcccgattgcataagctcttttacattttgaaaaaaagcggcggataactcgcggatcacgctgccgccgcacttaaaaacaatggttttcctcatgccgctctcctttgttatgtgcgatagctcgcattgattttgatataatcataggttaagtcacagccccatgcccggccgctgccggagccttcgttcaggcggactgcgatcgtaatttcatcacatgataagtactccttggcatcggtttctgaaaacggctgaggttcgttgtttttaaacagacactgtccgccgaggaaaacttccacttgttcggccgttacgcttgccgcactgtgcccgattgcgccgatgatgcgcccccaattggcgtccgtgccgtaaacggcggttttcacaaggcttgagccgacgatttttttggcgataatattcgcttcaagattatttttcgcaccttcgactttggcttcaattaatttcgtcgctccttcaccgtctctggcaatttctttggcaaggtcttcgcacacaagctttaacccctttttaaaagccggccagtcgggatgctgctccgtcagacgatcattccccgcgcagccgttcgccattacgagcaccatatcattcgtcgatgtttctccgtcaacggtgatttgattaaatgaaacatccgtgatctccctgagcgcgtttttgagcgactgttcttccacggccgcgtccgttgtgacaaagccgagcattgtcgccatgttggggtggatcatgcctgagcctttcgccgctccgccgatcgtgatgatgtctccgccgatcaccagttcataacacgtctgtttcgtcaccgtatccgtcgtcaaaatggcttcttcaaatgctccggacaatgacggcgcttgaccgagctgttcaatacccgcttgaatttttttcatgtctaaaagctcaccaatcaccccggttgacgaaaccgccacaagctctggttcaataccgagctggcttgcgaagctgtcccgcatttgataggcgtcctttaagccttggtctcccgtacaggcgttggcaatcgcgctgttgacaattaccgcctgaagcacagcttcttttttcaagctgtcttgcgtcactttcagcggcgctgcctgaaaatggctctgcgtatataccgctgcactgactgccggcgcctcgctgataatcgctccgagatctttttttgaatagcgcagcccgcagtggacaccctttgcctcaaaccctttcggcgaggatacgccgccttttattttcgtgatttcctcactcagctgaatcatattctgaatccctctttcgttctatggatagactggcgtcatcgtgagtcccgtttcttcctgccagccattcatgatatttaaattttgcaccgcctgcccggcggcgcctttcatcagattatctatgacagaaacgatggtcgcgcggtttgttctttcgtccacagtgacactgatatcgcaaaaattgctgccgtatacttcttttgtcgccgggtattcaccctccggcctgattctgacaaaatatgaatctttgtaaaattcgcaatacatttctcttatctgtgcagaagacattcccggaggggcgtcagtatacatcgtcgccataatcccccttgtcatcggcgccaaatgagcggaaaacgtaatcggacctgtgcccggctgccatgccgccaattgctgttcaatttcgggggtatgctgatgctcattgaccttataaattttgaaattatcattcagctcagaataatgagtgcccatggatgcttttcggcccgcgccagatacgccggtcttcgcatcaacaatcagaaatgaatcttgtaaaagcttattttttgccagcggggcgagaccgagcagtacagccgtcggaaaacagcccggattagcaatcagctttgcagtctgaatctcttctttttgcagttccgctaaaccgtaaaccgcgttttgaatcgttccttcaggggcagccttccgcttataccacttttcatacacggccgggttatgaatccgcagatcgccggaaaggtcaatgaccgggatgcccgcttccgccagcttaggtgaccactctccggaaacgccgggcggcgcggctatgaacatgacatcaatttcgtttcggatggtttctatatgaagcggctggagtgattgggacgctatattcctcagatgcggatatgaagcattatatgcctttccttcgtcactcgatgaatataatatacaattatctgcataagggtgatggttaagaatcctgacaagctcagcgcctccataaccagttgcgcctataatacctattttcaacgggttcaccttcttggtttttgtgaaattatttaacattataacatgaataaaaattaattcaattgtatatttaatattttttcacccgtttttccatctgttttcagagacaaaaaaacaggctgatcggatcagcctgttttcttcagcatcatcagcccgcttataaaaaacagcacagagctggcgtaaaaaataatatataccgtaaagaaatcagcaagaaagccgccgataataatggcggcggctgaaaatacagccgtccagaagtggtagctgccgacttttttcccacgttccccgccgtcggtataatcggcgatcaagattttttcgccgtgtttttgcatggccccgaacaggcccaaaagcacttgcacaacataaacctgttgtacgccggtaatatgcgggagcgtcagaagaagcagcgccatgccccatgaattcgccataaggaaccagcggggatccagtcttgccgacagcctgccgagcagcggatggatcaaagcaccgctcaggccgaacaagccgtatgacagaccgaattgcgtgtagctggagccgatgtttttaataaataaaatataaaacggaaagatcaggctgccggcaaaaaagacactgctttgagacaggatcagccattttaaatgattttgtttcatgatttgtacctctgataaaaataattcataaataagtcatccggatcatacttgtgttttttctgaaagaatatatcgcttttcggatatgcctcgcgcatctgctccttcgtttggtacagcatatacggcagataatagctgccgtgatggcgcaatgccgtatccgtcatttttctgacgatgcgggccgtatccgcctgactgtcttttgaaaacccttcattgattaaaagaacgagcgaaaacatgtcatcctttgcgtatgacagatcggctttttcatttttttgcacgtagcggatcgtaatatttacaaggttgaggtcttcatgtgacagcgccgcgcgtaaatcatgaatgtacggcgcaaattcgccgacgggtacaaagtactcttgaagcacatcggtgttgtccgtgttttcatattccaaaaatttcgattctgacctcatgacattgttccttgagattttcacgccgttttggctgagaaaataagactgctgtgccgaccagagccaatttcttccccagtcataccggcgggagaggccgagcgcgaattttgtcagcgcaggatgctcatcttctttcagctcattgtgctgctttaattctttctgattgtctgaaagcgtgtaatcagtcacatacatatcgtgcaaaaagcctttatctccggttgcaatccgtgcgagatgcatgcgcactgcagggttgcgccggacatgctgagtaaaatattgactgtatgtatcagcgttcatgcgcttcgttttcatttcatacagctcatcatccgtcagctcgatatccgcgtcaaggatgacgccgaacaggccgtatccgccgatgacggctgaaaacaggtcatctttcggggtgacggtgatgattttgccgtccgcttttaaaagatgaaatgatttgaccgtatctatcagcgaaccgtaccggatatcccgtccgtgggcattggcactcagtgagccgccgatcgtgaaaatgttttgtgactgcatgacctttaccgcgagcccgtacggattgacatagcgctgaatatcattccacgtcgctccggcctgcactctgatgatttttttcttccggtcgagaccgagtattttgttgtagcccgtcatgtcgagaacgataccgtcttcataatacgtctggccgcccattgagtgctgggcgcctgcgattgagatgttcagatgctttctctttgcttccttaatcgtttcgaccaatgtttctttctcttttcctttgaccgtctgcttaattttcacgggcatgagacggctgacatccgtcattgttcccgtcttctgctcccgttctttgtggaaggcagaaacagcgaacagccccgtataaacaaggatgctaaggataatgaaaagtatttttttcttcataggttcctccctcgcatgcagccggtctattatatcatgactcaagccctcttttttcctttttatccttaaaccgcaaaacaccgaatgatggaacattcggggctttttagctccttgtctttttttcgcacgccggtctgcaacgacaatcccggcagcgaaaagaaggcagtacgaatcaggtttaatacagcttaaaggccagccggaaaacagcgcggtaaacggtgatcataaaaatcacagaaacccttaaaaagttttttagtcggtatataatcgttatatataaggaataacaaccattttaaatgaggtgggaaaatgaacataaaaggaatcaatcatcttcttttttctgtttcacatttggaaaaatctatagaattttatgagaacgtatttcatgcacaactcctggttaaaggacaaaaaacagcatatcttgatctgaatgggctttggcttgcgcttaacttagaggtggatattccaagaaatgaaatacataaatcctacacccatatggcttttacaattgaggcgaaagattttgatgcaatacatcaaaaattaaaaagtctaaatgtaaatatattaaatggacgtgccagagataagcaagatcaaaaatcaatttattttactgatcctgatggacataaatttgaattccacacaggtactctgcaagacagactagcctattacaaaaaagataaaccccatatgaaattttatatatgatggtttatgtaaacttttgtgcactccaacacgttttgcgatcctaagcaacccccgcagccaaaagaaaagcacctccggattttagggtgatcctaaattccggggtgcactcaaaaagctgtctttcttattactgaatccctaatgcgattttcgcgtagcgtgacattttgtctcttgtccacggcgggttccagacaatgtgaacctcagtctcttttacgtccggaatgtcggcgagcgcttttttcacctcgtcgacgatgatcggagcgagcgggcaccccattgatgtcagtgtcatcgtgacgtgcgtcaggccgtcgtcatccatatcaacgtcgtatacgaggccgagattgacgatatcgacgccgagctcagggtcaacgacctgctccaaggcgcccatgatgttttcttttaatgcttcttccacgttccatcactcctttttcctcagtataacgtatatgcggcttttgttaacacctttgtgctttataaatgcttatcgaaccaggcgactgtttctaaaacggcgtatcgcgggactttatgatccgcccgttcgtctttcagaaactgaagatgctcaggccggctgctgtaaagcggtttaatcgtttcataaaaaccgcgggtcggtgcatacggaacaactttgtcttggacaccgtgccagaacaacagcgggcggctgcgcagtttttccgggtgcagactgagatcgaacggtttgagccgcgcaaacagttcatcgacctgttcttttgtgacgtcaatttcgatgtcctgcttctggatgtggtcaatctgctgctgaaaaaacgccgtatagttcgggcttcccatcagactgacgccggctttgacccaatcatacgcagccatcgcgccgaaagtcgtaattccgcccattgacgtgccggcgaggccgatccgctcgtcttcaatcagaccgcgcgcttcaaaatcctttttcagcacgtcaagctccgtgatttcatttaatacaatgtcccaaaaatggacggcgagctcttccgctgccagctgttcagcgcgttcaccgtggtaaagagcttccggcagcacggctctgaagcccttttcagcaagcaggtaagcaaaatgaagattatgctccttcgcgcttgtaaaaccgtgaataaagaaaacaaggggagcgggacggtcccgattttcttcttttacaatatgtaaaaacggaatgcctgatacggtttgatgatcaataagaatcacgttgactccctccttaggataaccataatcataagtgtaacatgtagacaataaagatggtaaaaagctacactgtacataagagaaaaacagcaaatcataaaggagttatttatggagacaaaaccttatctcatcgccttagatctggatggaactttattaaaagatgataaaaccatttcccccgaaacggcacggacgattcaattgctgacagaagcgggacatcatatctgtatctcaaccgggcgccctttccgttccagttcgatgtattatgacgagctggggctgacaacgccgattgttaattttaacggagcgtttgtccaccatccgaaagacgaatcatggggacgctatcatacgtctttatcagtcgatgtggtcagacagctggccgagcttacagagacctatcaaatacataatgtgctcgctgaagttatcgatgatgtgtacttccattatcatgatgagcatttaatcgaggcgtttcatatgaatatggcgaatgtcacgttcggcgatctgcgcgaaacagtcaaagaagatgtgacgtccgtattgattcacgcgaaggaagaggacgtcgcggacatccgcgcgcatttatccgaggtgcatgccgaggtcattgaccacagaagatgggcagctccatggcatgtgattgaaattattaaacacgggatgaataaagcggtcggcctgaagaaaatcagcgactattaccaagtgccgagagaacggatcatcgcgttcggcgatgaagacaacgatcttgaaatgctccggttcgccggctgcggcgtagcgatggaaaacggcacggatgaagtcaaacaggcggctgaccgtgtcacgggttcaaatgaagcggacggtatcgccgcatttttaacatcctatttctccctatgaggttttcccgctcataaccagaagccttccgcccatactaaaacagacgactcatctcgtctaaatatggaagggggacattgcaatgggtaaacgaaacaaatcaaaacggtttattcagcaaggcaaggactctgtcagtcttcatgacgcaagatttccatatcggtctacattagaggaagcacagcatgaggcagcaaaagacgaagctgaaagacaggttttttattaatgagaaacgaactgttttctcaagccaagtcattcgtccagcaggctgtcatgattgctaacggtttcgaggacggcgaccgggaaaaagctgtctcacgcgccaaaaatgccgtgtcttccgcgtacgccaattcgacagatgcagaacgtcagcagctgcaccaatttcaggatcagctggagaaattgcaataaaaaacggcgccccgtttaaacgggggcgcccttttttttacttcacttcaaatgtttttaccgttttcagcctttttccgatctgatcggactttcctaaaaacgtcaccgtgaccgtatatgttcccgggccgggcacgtttttccacacatctgaaaagtcatatgtttcattcggcattaatgtcacggtctgaaacgcctgagtaaacattctgtcttttgaatagcggtacagttctttgttatgttgatcatgtacggtcaattcgaatttctgccctgagctgaatgtgaaatcgatcgggctgccgcttttgttttttaaagacatttgaaattcgatctgctgatccgtctgcacaggatttacggctaattcaacttgctgttcattcatctctccggatacctcctcagcgggctccttctgcccggattgactgctgcatccgatcagtaaaacgaccggtaataacaggccaaacagccatttcattctatccgctcctatcagtcttttctgaagaaaccaaagatccccgtcgtttgcacgatgtttgtgaaggctttcgggtcgacctctttcacgattttctcaagatcatacaattcgtaccgcgtgatgacgatgatcatcatttctttctgttcgttcgtgtaagcgccctttgccggcaccgtcgtaatgccgcgaaccatttttccgtaaatcgcttctttgatttcatcggcttttttcgtaacgatcatggcggtcagtttcatgtggcgggtgtgaatggcgtcaatcacccttgttgtgacatacagagcgacaagggtatataatgctttctcccatccttgcaataatcctgccgtcaaaatgataatcccgttcaaaatgaagaaatacgtaccgaccggtttatccttccatttggccagcaccatcgacacgatatcaaggccgcctgtggaagcgccgaatttcagcgttaaaccgatgccgacagctgagatgactcctccgaatacggtattcaggagaatatcgtgcgacagtctcatttccgggagaattcccataaagacggacgtcagcgctacgcttaatatgctgtatacggtgaatgatctgccgactttcagccaccctaacacaccgatgggaatgtttaagaggaacatgagaactcctgtcgaaatataaaaaggggcgtattgatcaacgacgcttgacagcagctgggcgacaccggtaaaaccgctggcatatacattcgccggtatcaggaataaattcagtcccgccgcatacagaaacgcgccgatgacgacaattgttaatttttttgcttgttcaagtaccatggcttgctcctccgctcattttcattattagcttttcccttaaaacaaagttttgaacactaatttgccaaatttatatgatatagttggcatcactctcaccaattggaaagaagggaattatgatgacagttcaccttattgctgacagcgcctctgacctgccgaaatctttcattgaagaaaatcggatcgggttcattccgctgcacgtaacacttgacggaaacgaatatgaggacacggtcaccattcaggcggatcatatatttcaagcgatgcgggatgggaaagttccgaaaacatcccaggcatcgccggacacgataaaaaaagtatttttacattacgcggaactgggagaaccggcgatttacatcgccttttcatcaggtctttccggcacctatcagacggccgtaatggtcgccaatgaaatcaaagaggaatttcccgattttgatttacggattgttgattccaaatgcgcttctttaggctgcggtctcgccgtgatgtacgcgcagacactctgtgttaacggaaatacaatacaagaaatcgaaacatctgtaaagagcttttgcgcccggatgaaacatatatttacggtcgatgatgtcgcttatcttgcgcggggcggcaggatttctaaaacgtccgcttttgtcggcgggcttttgaacatcaaaccgattctgcatgtggatgacggcagactcgtgccgctcgaaaaattgcgcggacagaagaaactgtttaaacggattctagaaatgatgaaggaagaaggcggcgattgggcggatcaaactgtcggaatcagctatgccgataacgaagataccgctctcagcatgaaacagcagatcgaagaagcgttccatccgaaagaggtcattcttcattcaatcggatcagccatcggcgctcattccggaccggggacgcttgcgatttttttcctgaagccataatttccaatgccggcgggcatcctaacgaaaagaagggaggctttccgcatgaaagacgatgacaaaaaaccgcttgataataacgcccttaatcagaaaaagaaccggcttgccgaaaaaaaccgccaggcaggcaagaaacaggaatcgaaaaaacccgatcacctataatcacaaaacagccctctttttcaggaagagggctgttttgtattctatttgcgtctcacatcacttatcacaaatccgctttcaggcaatgccggcattctggacaggctgaagctcaaatcttggggcggaacatcgtattctatttcattagtaagaaacgctagggaagctttcatgacttccacggtcattccttcacccggacagcggtggccgtcagccggatcacctccgccctggggaatgaaatcaaatttattttcctcccgtccctgaaaacgttccgggcggaattcattcggattctcccaaagccgggaatcatggtttgttccatataggtcaagcatgacggatgcaccctttttaaactcacagttcttccatacgaaatcttttttcacaacggctcctaaaaacggggcgaacgggtaataccgccgaacttcatgtacaaatctttcggcctcctgatcatctcccgacctcagcttgtcccgatactcagggtggtcatgcaatgccagagctgaaaacgcaatgaagtaagaaatggcggcaatcgggcgcagaacattaataagctcaacagcagccatgtgagaatcgagcctgctcccgtcaagttctgtatgaacagccatttcatacaaggctgagccctccggcgtttgcagcttgccggaccgcacatcctcaatgacctcctctacccatttctccgttttcggcctcgcccttctgcctttccaatgacgcggtccgacagcgccgaatgcgtctaccatatcggtgaaatcctccgcccgctctttcacttccgagtctttcagcggaacgccggcccactcacaggcagcccggcacagcacttttttcgcttcatcaaaaaggacaattcggtctgcaccctcccacttttccgcagatgctttccactgttttgccaccgcttccgcaagccgtttttgccggggaggtgtcatcagcgacataaataggagcttcctgtgcttatgccgttcaccgtccattgactggattgcccctgttccgaataacgttttctgcacccgtttggggagggcttgctggcgctgaaatcgttctgtgtcataaaaaagctttgcggcttccgctccgctcatacaaatgaatgtcttccctaataatcgggcgcgaaacacatctgagcgataattctccgctctgtttttcacaaatacatatccatcgcgtaataaagccagactattatcaagacccttttcatgcggaatttgttcagtcatcccgattcctcccttcttttttcacctttcacgaaaaagaataaatgtaaaaacttgtatattcagtatttgtgtttcattcagaagttactcatgtcaggctgcaaaaatcaggggcggggcaaaagcctattacaatgtaaaacggcggacctgatcatttaaccgttctgtcagactgcgcaaggcattgacactttgtgtcatgtttttaaaggatgacagctgctccaaggctgaggctgaaatttcttcgcttccggcggcagtttcctgaacgacggcgctgatgctttcggcatgctgcagcacttgctcaccaagctgtttcgattcgcggatctgcccgtctaagtgagaaagctccgccttaatgtgcgcggctttctgttcgatatgggcgaatgattctgacgttttctccattagctcctgctgtctgtcccctaaagcgacgccggtcgtaacagcgccggtaatagatgtgatgccgccttcaatttgctttaccatatcgaaaatctgcgcggttgctttggctgatccgtctgccagcttccgtatttcctcggcaacgacggcaaatcctttcccggcctctcctgctctggccgcttcgatcgccgcatttaatgacagcagattggtctgacccgcaatgtcagaaacggtctgggccatcatactgatgcctgccgcgtgttttatgaacagatcagcggcttttgagatttcttttgacgtttcattgcttttgtcaatcgcttgttttgtttctgccaaagcacttcggcctgcagccaccgctgaaatggtgtcctcgctgcttgcagtggtctgttttgagcgctcggcattcgcttttgcgtgctcatccattttttcaataaataacaccgcatgctgcaagtcttctgaaatggtttgtgagccctttgccatttcttccgttgatacggacacctgctcggtcatttccgtgagtgtctggttttctttcgtcaggccttctgcaaatgtttccacttcgcggccgacctctccgatcgccttgattaaggtgcggagctgttctgtcatgattccgaatgaatcattcagctctttcagctcgtcttttcctttgtagtcgagtttttcaacagccaggtttccgccggcgatctgccgcgcgttttcggccatcaggcggatcggcccggcaattttctttgtcagcctgacggatgagagcacggtaacggcaaggagcacgattgttaacaccgctgcgctgtaaacaataaattgaatttgatcggccgtttgtttctgcatctgttcataacggctgcggctttcaagattgagcatgtaaatgtcattcagcagaccgttgatgcgggccgccgtccttgtcgcttcggccggactctttgtattcagggccgcagcagcctccgtctgccatgtttcatattttttggcgagcttttcataggcggcttttcccgccgggtcagtcattgttttttgtagcgcgttcagccggtcggagctgtttttcatataggtgcgaacgctctctttctgggcatcggcgagtgtgtaggaatagcttgtgatgctttctttcaatgtattgagttcagctttcgccgcctgaacgcttaacagcgcttcgacctcatcttcatttgaggcttgaatcttcatcatgtttacgatcgtaaaaccgatgacagcggcaaagcatatcatcgtcacggccgcgttaacgagaagtctggtccgtaatgtcacgctcattcccctcccttttcgatcagcttgcttttcatatcagcgattttttttgtcagctcatctgaattcttcacgattctgatctgggctaagtccatgccattttcctttaatccataaacgatttggccgtttttgatttgctttccgttttttaaatctttggccagctcgtaaatcacatggtcaacgtttttcactaaagaggagataacggcgtgttcggcagtgtaatattggtcgctgtccacaccgatcgcgtatatcttttcggcctccgcttccttcagcgcgccgacacccgtaaaaccggccgccgtaaacaggacatcggctttctgatgaatcattcgtttggcgatctgctgcccaagcttgtcattatcaaacgatccgctgatttcagacagtacacgaatatttggtttgattgatttcgccccttccacatagccttttttaaaccgtttaatgacgtcggcatctgagccgccgataaatccgatcgtgccagtttttgttgtcagggccgccagtgctcctgctaaatagcttccctcatcttctttaaaggtaacggaggtgacgtttttcagttctgacactgaatcaatcagcacaaactgctggttcggatattttttagcgaccttttctaaatccggctgcatgctgtagccgagtgccacaacaagatcatttccttcttttacaagttgagtcagtcctttttcatatgtaccggtatcctttatttctctgtagtcaaatgtgatgccgagctcgtctcttgctttcattaagccttgaaaaccagaatcattaaaggactggtcgccaagtccgttgtccgtcagcatcatcccgatttttttcgcctcacggccggccgtttcgtctgattggctgtttgcacatccggccgcaccgagtgcgatcagcagaacagccgcaaatatcaccatttttttcattgaaactctcctttgcggttttttctatatatcggtctgcgtgtcagaatattttatttcaataaaatatttatttttttgaaaacaaacatgaaaacaaagaaaatcaggaatattgtggttttgaaggaaataaaaaacatcggttttgttcaccgatgtttttgcagaaaatttattgtttttcgtatgtccagccgtcttcctgatataccttgccgtttttcatcaggtggccgagcgcccgcttaaaggcggctttgcttaaattgaaccgttcgcgaatatcgtcaggatggcttttgtctccgtatggcatcgcgccgtttcttgatctcagataggtcaaaatctcttcagcgtcaacagaaagcgcgtcctgctttctcggcagcagcgacatgttgacagagccgtcttccttcacctcgatgacacgccctgtcacacggctgccgagtctcggctcttcttttctttccgaagagtgaataaacccgcggatgccttcatctgtaataatgaaagagcctgatgcaatcagcctgtacaccgttcccgtcagttctttattcatcatctcttcgcctgcatctgtaaataattcgctgatgatgtcctccggcgccggcttggcaaacatgcgcccgcggtttgtcaccttaagcatgcaatacagtctgtcgcctttttgcggccagacggatttatacgggggcagatgctccgttgcgacgagcgcgtcttttgacagaccgacgtcgacgaatacgcccatatcctccacttgatccgtcacttccacccatccgtaatcataaaagctgatgagcggctttttcatcgtcgccgcgagcctttcctgatggtcgacgtaaataaatacgtccacttcatctctgtcttcgatatcctctgtgatttcactgttatgtaaaagaaccgtatcctcgccgtcagttaaaaaataaccgaaatcggtttggtgatctatactaagcgtgagctgctgccctggtctcatgttatcgtccttcctgcttcgcccgtatgaggctgatgtttttctcattttttccaattcacacaaattcatgctttatgctgttggacatttctctttattctactataatcaactcataagtgaaatgttataggaggttttctcatggcaaaagaaagttcttttgatatcgtatcaaaagttgaatttcccgaagttcagaatgcgattcagatgacgctgaaagaaatcggcacgcgctatgactttaaaggatctaaaagcgatgtgagtttagaaaaggaagaacttgtcctgatttcagatgacgagtttaaattgaatcagctcaaagatgtgctgagcggcaagctgatcaaacgggatgtgccgacgaaaaacattgaatacggcaaaattgaaaatgcctcgggaggcacagtgcgccagcgcgcgaagcttgtacagggcattgataaagacaacgcaaaaaaaatcaatgcagtgattaaaaactccggcttgaaagtaaagtcgcagattcaggacgaccaagtgcgcgtcaccggaaaaaataaagatgatctgcagcagattattgcagccgtccgcggtgcagacctgccgattgatgttcaatttattaattttagataaattatgtgattcctattgattattgtctctattttcggtaaatttggagaaagggattttcacagttaagttttggaaacccatgacaattaaatgaacgttcttatcaagagaagccgagggactggcccgacgacgcttcagcaaccggtgtaatggtttacccaaaccatgaccaaggtgctaaatccagcaagctaataaacagcttggaagataagaagagagacaaatgatcacaaagtcttcttcttaagaagactttttttatttctcttttttccttgctgaatgtgatgaaggaggcaaacaatgggactattacaagacttggaagaacggatattaatcggggacggcgcgatgggcactctcctttattcctacggcattgacagatgttttgaggaactgaacgtctcaaagcccgaggaaatcaagcggatacataaggcttacgtggaagccggggcagacatcgttcaaacaaacacgtacggcgcgaattttattaagctctcaagatacggacttgaagatgacacgaaaagaatcaatcaggaggcggtcagaatcgcgcgcgcttcctcagacggcgcttatgttttgggaacgatgggcggcatccgcaccttcaacaaaaacgcctacagccttgaggagattaaacgcagctttcgggagcagctttatttactgcttcacgaggagccggacggcctgctcttggaaacatactatgatttagaagaagcgcgcgaagtgctgaagatcgccagaaaagaaacggaactcccgatcatgctgaacgtttccatgcacgaacagggcgtgctgcaggacggaacaccgcttcgggaagcgctcagatcaattgccggcctcggcgctgatataacgggaatcaattgccggctcggcccgtaccacatgattgaagcccttaccgaagtgcctattttccgtgacgcttatttatcggtctatccgaacagcagccttccgtctttagaaggaggccggcttgtttatgatacggacgatgcctatttccgggagagcgccatacaattccgcactcagggcgcgcgcattatcggaggctgctgcggcacaacgcccaaccacatcagagccatggctgatgcggtccacggactttcacccgttactgataaagaagtgaaaatcagacgggaagaagaagtcatctcagtccgggatgaacggaccgatccgggtttagacgaaatcgccgcgcaaaaacggtcaatcatcgtagagcttgatccgccgaaaaaattgaattttggcaaatttctgcaagcggcggctgaattaaaggaaaccggcatagaagcgctgacgctcgccgacaattcattggcgacaccgaggatcagcaatgcagcctgcggttcattactgaaagagcgccttgatatccgttctctcgtccacattacatgcagagaccgcaatatcatcggccttcagtcacatttaatggggctggatacgctcgggctcaccgacattttagccatcacgggcgatccttcaaaaatcggcgactttccgggagctacctccgtctatgatttgacgtcctttgacttgatcaggctgattaagcaattcaacgagggcatttctttatcagggaaaccgctcggcaagaaaacgaacttttccgtagccggggcattcaatccgaatgtccgccatcttgataaggcggtaaaacggctggagaaaaaaatcgagtgcggagccgactacttcgtgtctcagcctgtttactcagagcagcagctcattgacattcatcatgaaacgaagcatctcaaaacgccggtgtatatcggcattatgccgttaacgagcagccgcaacgcagagttcattcatcatgaaataccgggcattaagctgtcagacagcatccgggaaaaaatggcgcaggccggtgaagataagcggaagcagaaagccgagggccttgccatcgccaagtcgcttcttgacacggcgtgcgaactgtttaacggaatctatttaatcaccccgtttctccgttctgatttgacgtcagaactcgcagcttatattaagcaaaaggatgaaaaacgggctgatgtatatttgcattgatgtgaaaacaagccgcctgatatgacaggcggctttttcatggtacgatacagaaaaagaatcaagcaaaggaggattttttttatggttgaagtaaaacccatcaccgcagaagacacgtacgcgatcagacacagcgtgctgcgcccccatcagacgatagaggattgtaaatatgatcaggacagcgtaaaaggagcttttcatctcggaggtttttacgacggacaattgatcagcatcgcttctttctatccgcagtctcagcaggcattaaaagctgagcccgcctaccagctgcgcggcatggcgacgcttgaggaataccggacacaaaaagcgggaagcacattaatcgcctatgcagaacggaaactggccgatatgggggcggcgcttgtctggtgcaacgccagatatcacgtgaaaggatattacgaaaagctcggctggacaagcatcggcagcccctttgacatacccggcatcggcccgcatgtgatcatgtataaagaactcgcttgaaacagacaaaagcccttggcgtctcttataagggctttgttttgttatttttagcgttaagcgaatccgtacatcacgtcccactccccatgcttttttaagcgccgctattgacgctctcccgcttttttattaccctttgttcattaagcaacaagcaattcggcaaggacggcaggtgtgaaacgatatctgtcaattgctgatttcagctattttttaagaaaagggagtaaaagatgaatacgatccaaaaaccgaaaatcccgaaagaattgccggtgctttctttcaccaaagcgcttcaggacgaacagatcaaagatgtcataattgaaaacgaaatcataagcggaaaactgcacagcctgcgcgctgaaaaagtcatattcagaaacatggtttttacagatgtctctttcagacatatggaatgtacggatgttctgtttgaaaaatgtgatctctcaaacgctgatttcagcggaagcatcatccatagaacggtctttcagcattcaaaacttctcggcctgaacttggcggattccgctatgcgcaatgtgcggtttgaagactgcctcgcaaattacagctcgttcagctattccaatatgaagcaagtccggtttgacacgtgcgctcttttagaaagcgagtggaatgatgccgcccttgaacacacagaacttaacgcatgtgatctgaacggcgcaaacttcatcggcacgtccctttttaacatggatatcagtacgtgcacatttgatcacctgcacgtctcacttgataagctgaaaggatgccgcatctctccggcgcaggccgttacattcgcagaagcgctcggagccatcgtgacgtaatcccctgaactacaaaacgaaacggcgggcgatgtccgctatcgtttgaatgcctttttccaagtccggcaaggatgcgtacgaataggaaagacgcagactttgccggtcttcgggaaggtaaagagctcccggattgatcagcacgccggcctccagtgcacgggtgaaaaacgtttgaacggcgaacgctttatgaaaggtgacccaaatataaaagcctccctccggtacatgccactccgcaatatctcccgcgtatttctcaagaaaatgcaatgccgcatctctcctgattttgagttcctttctgagacgcaagagacgcgtttcatagcggccgtttgacagccattggcatgccgcccattgagataacgcgctggagccgtaatccgtctgcattttaatatcggcaagcctgtctgcaaccggctcaggggcgacggcccatccgatgcgcagacccgggcttacggtttttgacagcgtgccgatatacagcacgtttccctcaccgtccatagatttcaacggaggcggcggttctttatcgatccataaatcaccgtacgcgtcatcttcaatgacaggcaggcgttgatttcttgcgagcgcgataagatctttccgccgcttatatgacatcaccgttcccgtcggattttgaaatgacggaatggtgtacagcagccctgcttcgtattgccatccgtaagcgggaaggtgatccgttttgattccgttctcatccatcggcacccccttaagcctgatgccggctgattgaaacacacgcagggaatgaagatacgacggattttcagtcagcatgacggagtttggttttaacagcccgattgaaatgagctgaagcgcctgcagcgcccctgagacgattaagatggatgccggagacgcgtaaatgccctttgtttttaaatgttccgagacgcattgccgaagcttcaagctgcccttcggttcctcatagccgagcgcaaagatttcagtccccgcttcacggaacagttcggccatctcttgctcaggaagcagctccgaactcagctcacccgttcccagccgaatcagatccggacgcggctcgttttgattaatggcctgaatcaaggctgaattcggctgatgacttcccgatgtaacgtatgtgctccaatcaaggggcttagccgctgccatgacgctccacgtattgttgacgacttttgtgcctcccccgctttttccttccagaagaccttgtgcgatcaactcatcaattgctgccgtcactgtgcttcgattgacttgaagctcctcagccagctttctttgtgaggggattttcgtaccgatcgtccattccccgtgaagtattttttctttcatatgctgttcgatctggagataaagcggtatgtatgactcccgatccggacgccagctcttcatacggcacccctccttttttacttattatacatttggctggttcagataccaaccaaatggccggagacatcagcacacgatccgtctacaatgagattcagctgatgattggaggaatttatgatatgaatgccatttttcacggagtgatgctcgctttcggccttatcttgccattaggcgcgcaaaacgtatttatttttcagcagggagcctggcagaaacatgtgtggcaggcgttccccgcagtgatagccgccgcggtatgcgatacgattctcatcaccgccgccgtcgcaggcgtgtcagtgattattgcggagattcctgtcttccggactgtcatgcttatttgcggctttttgtttctcagttttttaggctggcagacttggcgaagcaagccgcaggccgaacaggcgaaaaaaacggttttcacggcaaaaaaacaggcagccatggcagccgtggtgtcccttttgaacccccatgcgatcttggataccgtcagtgtcatcggcacgagctccgccgcctacccgggaattgataaatggctgtttgccggtgcttgtattgcggtttcctgggtttggttcgccggactggcatttgcgggacggctcgtccaaacggcggattcgggcggccggctgctcggcatcctgaataaatgctcggcattggtgatgtggggggcggctgtttattttgcggcgcttttgctccgataaaaaggagttccggcaagtcatgttgaatgtaccgaagggaaaagggggaattggaatgtcagagattctaaagctgcatcactaccacaggtgggcgaatgagcaagtcattcagcacctgaagaccatgcccgcggcaagcttacagcaggaactgaaaagtgttttcccgaccgtgaacgccgtgcttgtgcatatatgccgggccgattacatctggcttcacgtgctttacggagaaacttacgaacaaatcgtctcgcgatttgatcaatttgaaaagcttggcggagatttgggggcgattgaacatagaatgacagagcagtacgaagattacagccgatttttaaaagtactggagaatccagaaggtccgatctctatttctcacccgcgcctgggaacgctgaagacgacatatgcagatgtgatccggcatgttgtgaatcacggcacataccatcgcggcaacataagcgcgatgcttcatcaaatgggatataaagacgtgccgactgactacattttttttcagacgaatcataaaaaagcaaaggcatgctgagcctttgctttttctcttcgaatctatcacaacccggcatagctggaagcgcccggggtaagctttacagcccttccggttttaaaagattccgtcgcggcgatcccgatttctaagttaatcgctgcatcaacgtctgtcacaatcggagtttccccttttttcacacattcggcaaagtgctcaagctccagacgatatgcgtctttaaagcgggcttgaaaatccgggataatttcgtagctgctgccagactgcgttaaaacggtaacatggcttttccgcagcgtaccgactaaaatgcttcccgtcgtgccgataatttcggcgcggatgtcatggccgtacggagaatttcggcttgcctccacatcgccggccgcgcctgagtcaaactcaagatacgttaacgcctgatcaacatcgccgcattcctccatgaacgggtgctttaaaattctcccgtgcccgctgacggacgtaacctcggcattcatgagatatctcgcgatgtcgtaatcatgaatggaacagtcaatgaaaagccctccgctatgtttgataaattcagcgggcggtgcgccttgatctctcgtaaaccctttataataaatggggttgccgatttctccggcgtcaattcttcttttcgcgtcggcgtaagccgggtcaaaccgcctcataaacccgacctggcagatgacgcccgtttcttcgatttttttcatgacttctttagattcctcaagactaagggtcagcggcttttcaacaaagatgtgctttccgttttcagcggccttggtaatcatttccgcatgtgtgcttgtcggggtgacaatgatgacggcgtcaatcgcctcatcttccagcagatcattcggattttccgtccatttggcgattcctaattctttcgcacacgcttccgccttccccttcattgggtcacagacggccgcaagctcggctccccgaacttcgctgactaaatgctttgcatgaaaaaatcctaatcgccctaatcccagcaccgcacatctgatttgatctgtcatatatctccgctccttttaccttgaggccgcatgccgcgttaaagcaagcggtttctcttattaaacttgctttttttcatctatcattctttcataatcatcattgaaaaagcgctttatttataatgtaagctgattgcttattttgttttgcgcaagcgctttcccaaaagctgattttattttacaatgcttttcactcgtttgacaatgtttttcacagaaaaaaacgcgcctcattgctgcgggcgcgtttttgccggtgccgtagactgcctgatgacaagttccggagataaaacaattttactttttgcttttttcttcccttgaatctcatcaatgagaagttcaacgacgcgcctccccatttcgcggataggctgggaaatcgtcgtgagcggaggagccgtcatctcagcgagaatggtattgtcaaagccgatgacggacaagtcttccggcacccgaatgccccgggagcgcgcagcctgtattgccgcgcacgataacacatcattaaaagcgaaaacggcggtcggaaggtctctgtcaaacagctcggccgctgcctgttttccgctttccagcgaatattccgtcggaatgatgagcgattcatcgagtgtcatccccgcttgacgcatcgctttttgaaaacctttgattctgtctctttcacccgtggtcgagccgttgccgacgatacaggcgatctttttatggcctaaagatataaggtgttgagccgccgtatagccgccgagaaaatcatcgataatgacgacgtccatcggcgcgagcggtttatcctgagtgatcatcgcaagcggggtgcctgatttcacaatatcatcaagcgccgtgacgctgtcatcatgatcaagccccgtcgcgaaaataatgccgtccgcctgcttctgccgcagcatggagaaatacttcgtttctttttcaggctggtaatccgtgctgcagataatgatatgaaacccaaggacaccggcactgtcttcaatgcttttcgccagttccccgaaaaacggatttgaaatatccggggtgatcaggccgatcatattcgtctttttgcccgtcaaagcggatgcgtgaacattcggatgatagtccatctcctccatgacacggagcaccatccgccgtgttttgtcactgatcctccccgtgttgttgatgacccgcgagacggtcgaaatggagacgcccgccttttcggccacatcgtaaattgtcattttcatgcttactaatccctcttctgttctctggttttaggtcagtccgttttcctgcttacgaatttgcggtattcaagcggcgtaatgccttcaatctgtttgaacagtttagaaaaataggtcgggtcctccatgccgatggcgtctgcgattgcccccattttgtcatttgtggcggacaaaagacgcttcgcctccgtcattctgactttgttcgtatactggccgggcgtaacgccgagcacctgctgcatacagcgggtcacgtagtcttggttgtaatgaagagccgaagagagcgctttgatggtggttttctcctgatagtgctcctgcagataccgggcggcctcccatgcgactctttcctttgcggacggtatttggaacgcttccttttgaagatgaagcagcagctcttcaaacagaatctgctttctgagcggcagatcggagttctctgcgctgtcatcagtcaggacgctgaattgcccggccataaactgcgggcgcctcaccttacctttttgcggcagggacaggcggtagcgggccggctcttcaaagctgccttttttccgcctcagctccgcccagttattcccggttgtttccgtcacctcatatgccgttccctcaaaatgaagccacgaataggatgtcgtttcttcacttccttttgtcccgtaatgttcaaggccaggagaaagcagaatatattctccggcttctacggaaaaggcgttttcgtcttctgtaatgtagaggacgccttttttcacatacagcagatcaaacaccgggaagacccgtctcacatgggtttcgccttttttgaacgtcccttctcccgcagcgataaagaccgggaacggagggactgtgaactcgagaaaggacatattttcggccctcctttttaagtcggatttttgcaagaagtttcgtttctctccctttttattataagaaaatggaggtacacttttaaacgttgattttgtcaggaaaggggttaaaagaaatgaaacaagcgattttaaaacggactgcattcaaacaatcctctgatcacaaactctcattatacgcgctgacttggccgatatttattgaggtttcattatatatgtttatgggaaacgccgacactcttatgcttagccaatactctgacaacagtgtggcggccgtgggtgtcagcaatcagattttaaatttaattatcgtgatgttcagctttatcgcaacgggcacgacaattgtgatttcgcagtttttaggttctaagcagaaaaaagaggcgcaggaagtggcttatgtttcgataggagcgaactttgtcatcagtctcgccatcagcgccgccgtgtttttcgcggccgttccgatgcttcatgttatgggtctttccaatgaattgatgcccgatgccaaagtctttttacaggtggtcggcgggctgtcattcattcaggccctgattatgacgttcagcgccattttaaaaagctacggtcatacgaaggatacgatgttcgttacgatcgggatgaatattttaaatatcgccggaaactttcttgtcatcttcggaccgctcggcctgccggtgttaggcgtcgccggggttgcgatgtcaacgtccatcgcgcggatcatcgggttagttgctatgattgtaatcgtcaaaaaacgcatcggactcggtctgacatggaaaaagatctttcacgttcataaagagcacttgcggaaactattgaaaatcgggattccgtctgccggcgaacagctgtcttataacatttcacaaatggttgtcacttattttatcgccatcatgggcgcccaggcgctcacaacaaaggtttatacacaaaacatcacgatgtttatcctgctgttcggaacggcgatcagccagggcacacagattttgatcggcagatatatcggcgccaaacagtttgacgacgcttatgaccgctgcatgaaaagtctgtactgggcgcttggcattgccgctttgacatccgttatcatgaccttgttttcaaagcagctgatcggaattttcacaagcagccctgacattattacgacggcgagcatgctgattgccatgacgatcattcttgagcccggccgttcatttaatgtcattatcatcaactcgctccgggccgccggagatgcaaaattccccgtctatatggcgatgatctccatgtggggcatcggtctgcctctcgcttatctgttcggcatccatttcggattggggcttatgggcatctggatttcatttatcgcggatgaatgggtcagaggcattctcatgtacagaagatggaagtcgcggatttggattcaaaaagggattgcataaacgcccgaagcttcgttgtgaagccgggcgtttttttatgcctgtgtaagccgctttctcatgtcatcgagctctgaccggtaatgtgccagcaaaccggtaacggccggccttgagtataacggaaacagctccagctcttcagacgcctcttcgaaatacgcctcggcttcgaaagtgatatactcccatacattcataaaagctttgttgatggtatgtctctccagctcttcttccgtatagccgaattgttccatcacctgacgcggaagacgctttttcatccgctcatccgtatgaatcccagtgagaacccgggtcagctgaacggcggctcctaatgaaacagcagcatggcggagcttctcttgatttcggcgcgcgcaaaccggcagcagaagcagaccgagcgctccgcctgtttggcccgcgtacatcagcaggtcatcaaactcttgataggtctctttttctctgtcagacctttggccggcgataaactcacagaacggctcttcttccagcccaaattgctgccgcacgtcggcgagcgcctcccacaaaaagccttcggggcttgtcccgttcaaaacgtcttgtgccgcctgttcaaatccctcaaattcctgaacatccgcaagcttctcagcttcatgaaacaaagcaagcacagcccatgcggcctgcctgttttttggcggcagggatgaaaaagtttgtttatataaaggaaaatgcgcctcggcaagctgcgcgcatgtttcgtattcggtcatggtatcactcctctgttttttagtgtaccatatgtttcacaataaaaagaccgatatcctcagcggaaaccggtcgcggcactgttattcttctatatcaatgcggtacgcctcaaaccatgtatggatttgggcaagatgggcgatcagctgcgggcctttcatcagctggccgaaccatggaacctgaaaagatgaaccctctgtttccagcagcatctccagtttttttctgtcgagcagggtgtgaagcacggaatctttttgttgtaaaatcgttttcagccactctgtaactccttgcgtgtatttcgggtgatgcgttttcggataaggactttttttgcggtacaaaatgtcttccggaagcaatccttcaagcgccttccgcaaaatgcctttttcccggctgccatgcattttcatttcccaagggatattccaaacgtattccacgagtctgtggtcggcgaacggcacccgcacttcaagacttgcacccatactcatgcggtctttgcggtccagcagatttgtcataaaccaaagcatatttaagtagaacagctgccgtctcgctttgtctgttcccgtctcaccgtctaacagcggtgtttccgcaatggtttcttcatatctcgcattcacgtattctcttaagttcaggcgtttttgccatttttcgtccaagagggtgattctctcctcagtggatctcatccaaggaaatccgtcttcttccgccgcggtatgaaaccacggatatcccccgaaaatttcgtccgcgcattctccggaaagactcacgacaaaatctttttttatctcacggcagaaccacaacagcgaggaatcaacatcagccatgcccggcagatctctgacgagaacggattcctccagatgttcaaccagctgatcctgtgtaattacgcactgatggtgctgtgtgccgaatgcatttgtcattttatcgatccacgggccgtcatcattcggctgaaaggcgctcgctttaaaaaatttgctgttctcctcataatcaattgaataagtatggaggggatctctgccttctttctcaaaatgagcggcggctatcgcggtaatcgcgctcgaatcaagcccccctgacaaaaatgtgcagaccggcacgtcagatacgagctggcgcgtcaccgcatcctgaaataagtaccgaatatgagcggcggtttcatcgaagctgtctgtatgcttttcgctctttacattccaataacgccagatggacaaaccgtccttagaaaaagtaaacgcatgagcgggacgcacttcgtgaattcctttaaaaaccccgcagcccggtgttctggacggcccgagtccgaaaacttccgaaagtccgctgctgtctgtgcgggctttcacatcaggatgagcaaggatggctttcaattctgatccaaacagaaaggaagaaccgtgttctttataaaaaaacggtttgacgccgagccggtctcgcgccccaaacaggcgctcccgcttttcatcccagatggcaaaagcgaaaataccgttcaagcggtgaacgcactcctcccgccactcaatatagctgtgcagcagcacttctgtgtcagaggtccgttcaaaacggtggcctctcgcctgcagctctttccgcaattcttccgtgttatacagctcgccattataaatgatggtgtacgtttcctcttgatgcgtgcaggccatcggctggcggccgccttcaatatcaacgaccgaaagtcttttatgtccgaataaaacatggggctctccccagacgtttgaatcatcaggccctcgttttgaaagagtgtctatcatattgttcataatatgtttctcttggacgagctgcttttgaaaatcgacccaacccgcaattccacacatgtgatatcagctccaatcccgtttctgtcggtatcaaattcgtttctatcagcactttacccagtttatgcaaagaaacgcagatagttgatttgtcccactaagagttgtatgagacaagcctgatttggaaagaacggaagagaagatcaaacaaaggagcctcgtggttatgaaacgaaaacagcttttctcagaaaaaaacaaatgggggcgcggcactctgatgatagaggacggcatctgcctcgtcgaaaacgatgagggcgatatcctgcttgcagacagtctcggaaacgccgccgtattgatgaaacgtgacggcagatggcagccggcccggattcacggcggtacggccgaaatcggcgcagacaccatcgctctcttcggcggagaagagatccgttatgaaaaggcggtaaaacggccgcttttagccctgctggattcgctggacgatgaaacgtttctgctgtttctcagccatctgcacgggttcggcctgtctgtatatgattgcgtattttcctacaatcagtcgctgttttccggtgaaggcgtctcgttttatcatttctcggcggatgatgcccaatgcgccctgcagcatcaccgcggcggctcgggtaaacatgacagatttgaatggacggcatctgacgggcggcgctcaattatgtattcagcggcaaagcacggcggaacagcgtaaaaaacaggcggcgccctttaaaaggcaccgcctgttttttattttacaaccgttactttaaccgctttgctttcttgtttatccgtgtcggcagccgtcacataaagcacggtgcctgctttttgctttttgattttgacggagaacgcgcctttttgatccgctttctgcgtcgcgatcacttttttcgctttatctttgacggtgatttttgcttggctgttcgcttttcctttaaccgccgtatcttttgctgtcactttactgaccttcggcgtgccggacggggtccctttggctacgacaagcgtgacagatgtttttgcgtcatctttagaagctttcacgtgtaaaacggtgtcttttttctgcatcgggatatttactttaaacttgccgtctttacctgctttggcgcttccgatctttttcttgccgttcatcacttcaaggaccgtgccctctttcgcttttcctctgacagccgtctgtgtgctttcaagcttgttgatctccagccctaaatcaactgcgctgacagccttcataatattcaggcggccgtggccggaatgccagtcaactcccggaatgacgggaatcgggatcgggtcgccattgtcatcatacagctcttcttccttgccgtcctcgcttttaaacgagatatcgtctgcggtctgctttaatttcgcttcgacttcattcggtttaagcttcggattttgagagagcactaaacccgcggcagccgcaacatgcggggcagccattgacgtgccgctcatatatgtgacgtttccgttcgggacaagactcgggatatcagagccgggcgccgtcaagtcaagcccttttccatagtttgagaagtcagaggtcatatccatccggttgcttgcaccgactgagatgacatactttgatgatgccgggtaggaaagttcgttctgagcttcatttccgctggccgcggcgatgacaacatttttggacgccgcgtatttcagagcgtattcaagcactcggctgtatgctcccccaaggctcaggttaatgacttttgcgcctttgtcggctgcatatttgatgccgagggcgatttgctctgtatctcccgaacctgttgaatcaagcactttcacgggaataatgcccgcattgctgtttaaacccgccattgaatagccgttatctcgtttggcggcgataattccggcaacatgggttccgtgcccttgatcatccaaggcgctgtttgatctgtctacaaaattgcggccgagatcagtccttacctttcctttcaaatcggcaagcgtgctgtctacgcctgtatcaacgacggcaatgagcgtgtcagtaagctttcgcttcgacagcagagcagacgcctgatcaaatttcacatcggctcccttgacgccgccgtccgctccgctgtttttcagcgaccattgataaggatactggatgtcggccgagaggcttttgtattcacgcaccggttctgcaaattctacagccggcagtttggacagtgacgatgccgtttcttttacccgcttggcactcatcgtgtaagcgccgttctggtctttcggcatgtctagggaataaatactgtcaaacagtttttctgcctgcttgatgcgggacatgtcttttttagattgcgcgcttgctttaagacctgccgcttcttttgtgaccgcggcaaggcttttgttatttttcaatttaaaaatgactttcccggtctgaagcttgctttttgcagcaagatggttttctgttaaaaacgctccggctgttttgcctttcaggctgtgaatgccgagtttatccgccttttgctccagctctttttttatatatgacggtactgactgaagtacggcggcgtataaccgttcaatcgccttttggtcttgcgcggtcaccgtgtatgcggaatccgcgccgttttcagccgtatcgctgaacatcggcttcagtgttttaagatcctgatacatttcatctcttgcttttttactgaatacgagctttgccgccataaacggagcggttttgtaatataattttgacaactctttgccagtcggggtttgattgagctcttgatcacggatcgtccgcaaatcttttaaaataccggctccctcttttttctggctgacactcatttcaacagggcaggactcctcttcttccaaatctgccggcccaagcgacgttccttcatagccgatggtgtattgcgctttttccgcattttcattctgagcgccttcatcttcgggctcttcacccagatactctacttttatatagtaggggccttcccaggcatgcggaatattgatttcaatttttccttggtccgtgtaagagcggtacatatcaaaggtgtcatcactgagggctttctctttgctggggtaaacggatacatttaagaaagattgacttcttacagttaatgccatgtgcgaatcttgtttcacttcatcttttccgggcgtgattgtataccagactgattgttccggcttatcaatggtgccggactgttctttcccctttgccaaggctttcgtctggccgatttgttcctccgctgacacttcagaaaacggagcggcgaggctcagcactagaaccgctgacaaaacggctgcccaaaaagatgcaaatctccttcgtctcatctcaaatccccctatcttttgattctcttgaagagtagcatactgaaagagaaacagatacctaaaaaaggaatatttaagctgaaattaaaatacatggaaataggcgccgaatataaagatttatgtccaaataaaaaaacccggatcgtatccgggttttcaagcgattgattaaaatatgtgaaagccgatcggcaagtgaaggccgagaagcaccgtcaggacgagcacgataataaaaccgatccacagtcctccggttgatttgccttttttcttgcggatgacgagcatttccatcaggccgatggtaatgatgccgagcagcatttttccggcgtactctccgttccaattcgcaaaacggacaaacagttcagcgccggtcaaaataataataatgtagaataagcgcagaatcatatgcgtaatttttgcgcctttcgctttccctgagccgtacagcccgtagctgacaaacaccagtataagcgcaacgacccatgaagtaatatgccaatgtgtcattatgttcaattcccccctatcagatcaatctgcctcacttatggtaccacaacaagccgctgtgagcattatcaatcgcgataaagacacacaattatccgatttggttcgacagcgtgccgatcggttcaattgtaatgtcaacgcggtctcccggctttaaaaatttcggcggctgaaacccttttccgacaccggccggcgtccccgtcgctattatgtcgccggcttcaagcgtcattccttttgacagcgtctcgatcagttcagcaatcggaaaaatcatgtcacccgttgatcctgattggcgcagttccccgttcacccgcgtttcaactttcaggctttgcggatcactgacggccgacttatgtacaatgaccgggcccatcgggcatgtcgtatcaaggcttttgccgataaaaaactgtttatgctttttctgcagatcgcgcgccgttatatcatttacaatggtatagccgaaaatatggtcaagcgcattttctttggagatgtgcgatccgctttttgatataataaccgccagctccccttcataatcaagctgctccgttgcatccaagtggcttttcactgtttctccgtggcctgtaacggaagtcggggctttcgtaaaaaccatgggatgctccggaatatccgcctcacttcccatttcaacggcatgatcacggtaatttttcccgatgcagatcacgttctttgaaggtctcggaataggcgcacagagcttcacgtcagacagtgcatacataaatgaaccggactcatcattcggttttttggcccattccgcaagctgtccggtatgcgcgacgaacttttctcccttttgaatacactctatcagcgaacccggaatcgtctcaagttcaaacaattttttttcagccttttgcagatctaagattttgtcatcatccatgatcaggccgacaaatttccggctgttcagttcccctgtcgcaaatttcatgttaatcccccatcatttttaaatctggcattcctttatgtattctttctccgggcggaaaatcctcttttgaacaggctgaaaatattcgtaaaagagtatcaaaaattgtcactttttcagtcatattgacgaaataaaaccttctcagccaaaatgggttatactattaccatcctatgttttccaaaataatcgagaattggagaccacacgatgaacagtaaaattgaagaaaaaagattgactttattcgagacagcgcaaaaattcggaatcaatgcgagggagaccatcaggtgcagccaagagctggacagcctcttaaacgggtgccggggcgggctcatccaacaaacgaaagacagcgggctgaacccggccgcacagcttcagccggattacactgtagggaaaaaagaggctttctcataaacacgatatgaatatagatttgaaccatttgcttttaagacccggcacgcgtaaagcgccggtgtttttttatgtctgagatttttccgctcacaaaaatgtgcgtttgtcataagctattttaggcaggcagcccaaataagctcctggagtgtattccatgaaaatctttacgaaaaggatgtgctcgtatgcccgcaattgtcggagcgtttaaaattaatgccgtcggtacgagcggagtcgttcatataggcgactgcatcaccatttctccaaaagcagaggttaagtaccggagacaatctcacactgacgaattacaggaattcaacgaatgtgtacgataatgatgtaatcgatcagccgatggcaggtaacgcataaaggaggcgccgtatgaatttttacgtcaatcagtcgatccatatcaattacatgcgtgtagaatctgtcagcaattcctccatactgcaaatcgggagcgccggttcaattaaagctctttccaacctgtataacacagggagttatgtagagccggcgccgcctgtcaccgcggggcagactgcaacaacagggggaggtcccggcacctcatcatttgtaccgctccagccgccaagccggtagttcaatgaaggaaacgagacgcgaggtgaatgtcatgtatgatcaatcggtttcatcctacctgcagaatttaaattccttcgtccagcagcaggcgcttcagattcaggagctcgaacggcagctgaaagagtttcagaacgaaatttcaacgctgaaacagcagccgccatccacaagaatcgatcggctcgagtataaatttgatcagctgaaaattgaacggctggaaggaacgttaaatatcggattgaacccgactgatccgaatgccgttcaaaactttgaagtcggccagacatctccgcaggtcggaatgatgcagcaggaacaggcgggccagcaaatgcagcaaatccgtcaaaacgtcgatatgtacctgaatgaagaaatccccgtgctgttagaacagctcgaaacccagtatgagagcaggctggacgaaacgaacaaatatcatattattgaagatatcagaaagcagatggacagccggattaagtattatatgtcccatgtcccgaaagaagaaaacacggcgcccgcgcaatacgccgaggagattgccgaacacgtgaagcgtgatattgtcagggccgtcgagcattttattaaacacatacctggtgaaatgaaaggtgatgatccgtcatgatttttacagtgattaaccggaacattgaagtcggcgatatccggtcgaccggtgtctccagttcttccttattattaatcggcgacaccgaatccgtctacctgtcttccatctttgatacacctccggaatctctcattatcgggcctcttgtgccgctggcgccggaataatgttaaagcggatttcacgcctcaggagcgccaaagtcaattcagtcgggattgggagtgtttttcaagcaggcgatacgaatgaaatcaatatgaaggtcaaagttttggccgatcagcgtactcttgccgtatacagagacgatgaaggctcgtttaacagaaaagaataccagatcttccggcagcccgccgtcatgccgttaccggaaacgggagtccaaagtgcattctgccatgaaaatccttcgattcgggtaaggaatgtgaaagtccaaggggtatcgtcagcgtccgtgcttcaaatcggatcgtcatcggtcgtattgggcgattcacggctgaaacatattaggcagatcgcctcaccgagctcacaatcaccgcagacctgacatataatgacggtgagacttctataaagggtgtcgtttatgccagcaattaccggacctatagctatcaattccatatcgggcggagtcgtaaactttggtgattccttttacctttctccaaaaagctcttctaaatctgcgctcggttcgggagcaggcaataccggagatttccttttattaaacaacgttgtcaatgcgacaaactatatagaccccgatgtcagcgatcagaatgtggccggaaacgcataaaaagcagccgctctttaaggagggggctgcttttttgtgttcagtgtttttttcgttcgtttgatttttttgttttcacaagcttttccggcggctgttttctgatccatttcacaaaccgcgcaagtttcggatcacgccgcagctcttctattcccgcgagccttgccgcaagctcctgattcgtataaagcgcgtgtacctgtttatggcagggaatgcagagcattgcggtcggaaggaatgtcccgccttcttccttaggcgtcaggtggtgttccgtcagccgcacatgatggcggccgcataattcacatgtgccctcggcagaatcggccatagctccttctcctttctacatgatctccattgtgacccgggtgccttttccgcccggttcggacggatgaacgattaattttttcggcagccgcgctctgagctcctgcacatggctgatcaccccgacggacaaattatccgattgcagcttttccagcgctgtgacaacggtgtctaaaagcccttggtcaagcgtcccgaatccttcatctaagaaaaagaattgcagcggatattgcccccgcagctgaatctgggcagacaaggcaagcgcaagcgacagcgatgtcagaaacgtctcaccgccggaaaggcttgatacggggcgtttgacgccgccgttcgcgtcatcgcgcatgacgaagccgccttctgaatcgactaatatggcataccgctgtcttgtcagcgctccaagccgtgcagaggcgtctcgggccacgctttccagctgttcctccgctaaaaattcgacgaatgtattgcctttacatacagactggagcttatcaagcctgtcaatctgtgtctgccagcttttcagttcggcttcaatctctttaaagcgcttatgctgtttctgcatcaccgcaaaggcttttgcctgagctcctttttcctccttggcggcgcctgactcagcctctgcctgctccagcagagaaaccgatgctgtccattcttcttccgttacccggcggccggctaatttatcagtgacacggcggatatttgccgaaagctgctttgagctgtccagaaattcatcaatttctcttttcatttcctcggcccgctctttcggaagcaggctttttttgacttgatccggctcggcaaacccggtgtcttttgatttcccgtaccagtcattttgcgctttctcaagggcggactcagcgtcccgcagtgacatgaggctcccggattcccggccttttgcgtcattcagtgattgctgagcctgctgcagcgcatcgaataacgactgttctttcgattttaagagctgtaattcctgccgcactgcgtcaagctttgcagaaatggatgtttcttcagctgctgttccgagctcttgttcatatccgtcaatgacctgctgcaggcgctctgacgcatagtgaagctcgagccgttcccgttcaagctgatgcttcttctcctgcagccgttctttctcatcttcatgttcctttaggaaggcgatgcttgtttcaatgcgcttctcgaattcctctgcctgcctgtccttttcgtctatcgaagcctgccaggcgtcaatccggtttaacggaatatccccgcaggcttcattgtactgattcaagcggctttctgacagcgattcgagctcttctaatgaatgtttgaggcgctctgcttctttttcctcatagcggattcgttcgcccagctgttcagcttgtttcaccgtcttttgataggtactgatcagtctcgtgaccttctcttttaccgacagcatatcctgtttcatttgtttccactccaggcggacggcgctgaacgcttcatcaagcggacggccgctgatagaagaagcggcttccagctccgggacccgggcgttttgcagaaacggacattcttcggtaaaacgccccgactgctcttctaatgcaaccttggccgtcagcacttcctgagaaagagccgccgcctcagaaagcagcgcttcaacctgctgcaaacgttcctgtacagccgtatcgggcgaatatgtttcatgagcggagcgcgaacggtcatgctgcgttgagccgcatacaggacaaggctttccttcgattagtttttccgataattcttttgttaatgcagccgttctcgcttcctctgagcgcctgcgcaggtcggtttgcgttttgtccgcccgttcggctgcggctttcagtgaacgttccgtttcacagaccatatggtaaacggtttgaagtgtttgataagcgcgcgtaatgtcctcttcttccgatttcgcctttgcgctgagcgcctcgctttctccgttcagcttctccatgtttttcaactgggctgtcagattgacccgttctttcttgatttgttcctgtgtctgctgaaagccggctgccagctgtgcggcggtctggcattttttccgttcatcagcggtcacttgaactactttcagctcttctttcagctcattctgcctgttttggccgcgggtcaggcgatctttcactgcggtcagctgtttcgaggcggcttcgtattcttcctcttttttgccgtgctccgcctttgttttttccgcttctttttttgcttcaagcagcttttgttcaatggctgacagcctttgatacagctcttcttccttgacaagcttcggctcttgttcagccttatgaatccgccacgcttcataggcttcattttgccgggtaaatgaagcggtttccgcctctaatttccgtttggccagttcgtgctccttctcggcgcgctccttccggcggacggcttccgtgtagcgatctgcatacggttcaagagcgagagcagtttccgcttctttaagacggtcagtcaaatccgtgatatacgggcgtttttcctcaagcttttcctgccgcacctcgtattcgtttctctctgtctgcaagttccaaatctcctggtgattctcaaaacgttcttttgcttggacccgtttcttctcagccgcttcaagccgttcattcgcttcatgaaactgctgttcagccagcttcagcgcgtcttcccccgcgtctccgaggccggattgttctgccagcatctcattttttttcgcggccgcttcctgcgcccgccgccgcaattttttgacaagcctgtcaccgtactgttccagattaaaaaggcgctgcagcatatgtcttctttccgcgcctttcagtgacagaaactcggcaaactttccttgcgggagcacgacggctcttgtaaagtcgtcaatggtcagaccaagaagctcttccacctttttgttcacttcattcgctttatcggcaagcacggtttgttcctctttgatttcaatcaagcggcaaagggcggttttcactttcgtttcatccgttctcttaaaaacgcgctctactttgtaggacaccctgtggccggattgaagcgcgaatgtaaaagagacggcgagctgatcttcggcatggttcagaatgccgtgcgtattatttgcggcgcgctccacttttccgtataaagcgagtgtcatcgcatcaaggatcgacgactttccgcttcccgtcgggccgaaaattccgaacaccccggcaccggacagtccgtcaaagtcaatggtctgttcctctctgaagctgtggagcccttttatcgttaacagaatcggcttcatgtcgcatcctcctcatcatccgctgacgcaagctctaaaaacagcttgaccatctcctcatccggcacgccgccgcccgtttgtttttcataaaatttcttaaaccggtcctcaattgatgtgtttttcacttcaatccggtcaatgtctgtctctttttcttcaaaaaccggcctgatatggataaagcctggatgcgcttttctcagccgatggatttcttcaagagaaagctgatccgtcaaatggatatcaagatcgatccaggcattccggtcacgcccttcatcgagccagccgtgaacctcgctcagcccctgcgctttccatttgacaagcggttttccggaagacaggaaaatctcttcccacttcgcttctccgcccggcttcgcttctaccaccgtcaccgatttggcataaccggcttctgaaaagctgtatgccagcggagagccggaatagcgggcagccgttttggcacgcttgatcgtttgcggacggtggagatggccgagggccacgtaagccgcatcagccggcaggctttcagcggcgaccgtgtaagcgcccccgacttcaatcggacgctctgaatcggtctgatttcctcccgcgacataaatgtggctcgccgcgactttcacggcatcgtcccggcacagaccgcacatgcgggcaaacgcctctctgattttcacatcgtaatgatcgcgaagaagcttttcctcaaacgtatcagacagcacctcgtttaatctcgcttctgacggataggccagcgcggcaacggctaacagctcgtccgccgacggcacctcaatatggacgggttctgtccgcggatagccgattaaatgaatgccgcgctcatttgttaacggagaagcagccgccagcctgtcaggattgtcatggttcccagcaatgacgacaaccgggcgttttccgccgtcagaaagcgcggaaagactttcgtaatacagctgttcagcgagcgcaggcggattgaccgtatcaaatacatcccctgccataatgaccgcatcaatgttttcttctttgacaatggtattcagctcttccaatacctcggcctgttcactcagccggcttctgccttcaagcgttttgccgaggtgccagtcagctgtatgtaaaatgcgcataccgcattcacctcacttttctgatagaaaaaaagatccgctccaaaaaaggagcttcggatcttattacagtgtaagaacgtgacctccatcgaagaaatagagcgcacgccttttcacattcgtttttgtaatttgttcaaccgcttttgtatacaattcgatttgtgtttcataccttttttgcaggatcggagccgcgccttcaaatccgttccggaatttcccctcaattcgatccgttttatagtccagcaaatagagtccgtccgcagtttcatagaggcagtcaataattccctggacgagcagcggttcaccggccgtttcggcatccttgtacacctcgctggccggaagcgccatactgaacggcacctcccgatcaatccgcagcgccccaacaaggtcttttccgatttcagtgccgaaaaactgaatcacttcatcaatatcaattgcgtcctgctgttcttctgtcagcagctctttttcgtaaagcatcctgaccgtccgctccgcttcttcggcagtcggaacatgcgtcagcggtatgtgctgcatcaccgtatgcatcgccgtccctttttcggcggctgtcagcccttttttcatcataaagccgggacgcttgtataaaagagtgtcccctgacggtttgatgagagagcgtccgctgtactcatcctcgtattcttgctttctcttcagctcagaaacagactgcttcgttctgatggcggtcagcttccgatacggatattcccattcaagaagacggcgcgcctgatcatcaaatgaaaacgaatcaggaatcggctcgccatgctgtatcgcttttaaacgtttgctcttttcttcagcacgttcttcaggactatcttccagcaattcactttgctgcagcatcctgatgtgaaaacgcgccgggtcgtgcgcgatatcctccggcgccaaaagccccggcgccctgtgcgcctccatgtcactgtgacggatgagcgctggaccgataaagtccaaataagatgacgcctgatagcggtcgaattcagaaaggagccaatcagcccggtctgcttgcgcctgccatttggccagctgtttttcccggtttttgcaggaaccgacgagaaacagcttttccttcgcccttgtcagcgccacatacaatacgcgcaattcttctgataaaagctctctgcgcatttttttcttcattgccacaagcggcagagtcggatagctgattctaagttccggatgaatatacttcgtgccgaaaccgagttctttatcaagcaggtatgatttgttgagatccatcatattaaaacttctgccgagtccggcggtgaaaacgacggggaattcaagtcctttgctgctgtggatcgtcatcagccgaacgacatcctcctgctcgctgagcgcccgcgccgtccccaaatcatcgccgcgctcctgcatccgttcaatgaaccgcaaaaagcggaataacccgcggaatgccgtcgcttcatacgaacgcgcccggtcatacaagacgcgcagattggcctgacgctgctttccgccaggcatgccgcctgcataatcaaaatatccggtgtcgcggtatacttcccaaatcagctcagacactgaatgattcgtcgagaatgaccgccacttctgcagactgtcataaaatgttctcagtttttgatacaggtcgtcatgtctgtcaccgttcgctatatacgctttcagcgcttcataaaacggcgcttttttcttttcaaggcgtatgagcgcgagttcattttcgtcacagccgacgatgggcgagcgcagcacggaagcaagcggaatatcctgatacggattatcaatcacctttaagactgaaagcgccgcagccacctccacggcttcaaagtaacctgacgtcaaattggcgtaaaccggaatgccctggtttttcagctcttccattaattgcggagcccatggcatggagcgcagcaaaatcacgatatcccggtactggatattccggtgtgtttttgttttgccgtcatataccttaaacggagatgagacaagcttccggatctccgcggctatcgctttcgcttcccaatgcacggtttcaaagtcttcggcatcctcggggctgtctgcgtcatcagcgctgtcaatcagcagcagttccgttttcgccgcgtcattcggcggatatgatgcgccaagctttaatgccgcctgttcatcgtagtccacttcgccgattttgccgcccatcagctgcttaaacaagaaattcgtactgtccaaaatatcggagcggcttcggaagttttggttcaggtcgattttctgcccggcgccttccccatcttccgtaaaccttttgtatttcccgagaaaaagcagcggctcggcaagtctgaaacggtagattgattgcttgacgtcccccaccataaacagatttcccgcctcttcattcccgcttttcacaagctgcaaaatggattcctgcacaagattggtatcttgatattcatcaaccagaacttcatggaattggtcttgataataaacggccgcttcactcggcacacgccggccttcttcatccctcgcagttaaaatcgccagacagtaatgttccaaatctgagaaatcaatgattgatttttcctgtttcgccgcttcaaatcgttttccgtatgatattacgagctgaacgagggtttcaataacaggcttcatgtcttttaaactctttaaatgatcttgcgggcttcttgtaaagtaatcggtttttaacttttcgatcagtttcttcgcgccgtttcgcaaatcagtcgcttcgtccaaaagcgccttgtcaaattcatcaccctttaccgccttggcccgtttaaatgtgaccgcaggaacccgttcatacagcgccttaaagtcatgccggcagctgatcagctcttctatctgctgaaggtcatccagaacattatcagcacgcggcgccggcccgccgggcgcttttgtcagttcaagcgccttctctagcttttgtttagccccgaagagcgccatttcagcatcttctctcacatactcgtaaaacggcagctcttccattttgctttcttctgtcacatcatataggcggacaaagcttttcagccacgcttccgggtcaggatgcgaccgggaatactcatacacccgcttgacgaggtcttgaagatccagatcatgcctgtccgtcgtatatctgtccacaagctcaaaaaacgcctgattcccttttgcgtattcatcctcaaacagctcatcaagcacttcgtctccgagcaattcgccttccgtctggtcagccatccgaaaacccgggtcaagatcaatcatataataatattttttaagcacctgcagacagaaagagtgaagcgtcgaaatgctcgcccgatttaatagagacagctgccgtctgatatgcagagaccccggatttttggcgagttctttttctaatgcttcagcgatccgatgcttcatttccgctgctgaggcgtttgtaaatgtcaccacaaggagcctgtcaacatcaaccggctcttcttccgcggttatctttctgatcatccgctctacaagcacggccgttttacctgatccggctgcggcagcgaccagaatatcgcggccggaagaaacgatggcgctccattggtcatccgtccatatgctgtctttcggtttaggaatttgcatcatcatccgcctcctttttcagccaatccagtatagtgccgtctttttccgctttcaggctgcggtattcattttctttaagcgactcatcaaactggcacaccgatttaaacgcacagtacgtacaaggcgtcttatctttcagcttatacggggtaatggacacaagcccgtccgttatcgcttcgcccgcctgctcaaatgtccgcctcacatggtctgtcagcagatgaaaatcccgttcgctgaccgcggctgaatcggaccgtaaagaaccgtcctttttcaaaccggcattgataatatttgaacgcccttcctccaaagtcgtgtccatcaggctgatcgcctcccggtcaccgaggagaaggcctttcattttaaatttcttaaaaatttcctgctcgatttcatcaagttccatcggcagactggcctgaatcatcggatcatgaatatggaaatacaaaacgcctgccggtgtcgctttcatgccgagccaatccgctgagtgtgtaattgataagtcaaggtatgtgagcatttgcagagcgagcccgtaatatacctcagcgagatcaagccccttatcgcttgatttataatcaacgattctcagcagcaggccttttgagctttccgctttatccacgcggtcgatccggccgacgagttccatcgtacagccgtttttcagcgtgaaagtgagcggaggcagcggtccgcttccgccaaaaccgagttcaaggccgatcgggacaaaaccgctcgccttcgcatgctcgcttaatatgcctgagacacgcgtgacgatcttctgcagtttttccttcacataaaagtgcctgtttgagctgagcagaatctctttttgcagccttggcgcaagccgttccaccgcatcataggaaaaattccggcactgatctttcgtcagatcgcgccattccagcttctgctcacgaagccggtctgaaatcagcttcaggctggagtgaaacagctgtccgatatccggcgcttccagcttgaaaaactgccgttcttttaattgcagcccgtgagatgcaaaatgagaaaactggcaggcattaaacgcctccatacgagagacgcttcctttaatgtgctcgccgtaaagctggcgcgaaacaggccgttcaagacgctttgcctcatttcggaaaaacaggcttgaaaacagctttttcgcacgctcgtgatcaggctctttcatcagcacattgtatgcgctccaccacacgtcactgatctcgtactctcttgtccacagcctgagctggcttgccgtatacgtctgtgccacctgtttattgacgagatactgaagctgttcttcttcgcttacctgctcgggatcagccgctgacagcttttcctggtgatcgggaaacagctcgccgagcctgtttacaacgattgacggcaggagcgtttttccttccgcatcggcaatcggatatgtcacatacagacggtcagacggacttgacagcgccatatagatgagaaaatgctcatcaagcagccgctcacgccccgcggaagaaagctccactccgaccgctttcagccactcccggtcatcatcagacagcacgccgttttcatccgggcgcgccggaagaacgccgtcattggctccgatgacaaatgtgcaggatgtgccgtacattctggacagatccatattccctacaaatacttggtcaagcgcaggaggaattaaagaaaaatgaagcgattcggttcccgtttcaagcatttgctggaacagcgccaaagacatttcatcttcacccatcatgcccgtaaactcttcgagaagctggataacggcatcccacgcctggccgtgctgctgcgcttcaatcatgtttccggcctcttcggcctgctgtcttttccggtccagcttcaggggaacatcggtatcttccaaaaagagataaagagcttctgccatgctttgaaccgttttcgcttttttcagccggttttgaagccggatgagcggctcggccatccactctctcgtctcattcagcatgtgttccatctctatttcctgatccgtctgcgcgaaatcctcatcgagcgatacgaaccgcctgtatacaaaccgctccccgttcgtccagcgctcgcctttgattccgtaggcgatacagtagttttcaagctgatcaacctgctctcttattttctgctccggctgatcaagggggaataacagttcggttttcgcacagcggaacaccgcttcatatctccaattgcccttcacgacatccaagcttgagcggatgaattcaataagcgggtgatgctgcatagaagcttttccgtctataaaataaggaagcccgtaatctgcaaacacttccttcagcaagtctttataatcttccggctgacggatgagaatcgccatatctctgtaccggtatcctctgtcccggacaagtgattgaatttcccgggcaataccctcgagttcagctcttctgttctgtgcctgtatgacggtaaaagcttcctgtccgcccgtatacacagccgcgggacgcacatcgtactgcgattctatacaggcaagctccggcacatgctgatgccgcttcgttccatgcaattccttgcaggaaatatcggcattcaactcctttgccgtctgataaagcttatagtatgtgctgccggtcattctgaacagatcgagctcatccggagcctgttccgccgaagggctgtccgccgtcagagagaatgtgacatgttcagcatgcatgatcagctgctccagcacccttaattcctgcggcgtaaattgatagaagccgtcaacataaacacgggcgccttttataacatccgccaaaggaatctgctgagcgagcagcgtcaaataatcctctgaatgcaaatagtggccggcgaggcttctttccatctgctgatataaaatgcctaagtcatgaagtttttcagacagcatccgctctccgcggtattctgacgccgttccgctttctgccatgcggcggacgtcttcaggttcaatacagtaccgcttaaactctgtcagcatccgttccacctgctcagtgaatccggttttgtcactcgctttttgatagactttaaaatcgtgcttatgttcttcaatcagtttccttaaaagcatctgcacacccgtcgtcgtcacaaacggacggttcatgccccccgtgtgctgaagcacgcgccacgccaaacgcgaaaagctgaacacttgagcgcgtatcatgccgccgatatccggcgttttagcaagctcatattccattaaaaacgtcatttgatccgggactagaaaaatgatcggtttcccgaacggctcccggcgcagttcttcttgaatgctgtcgataatcagcctcgttttcccactccccgatctgcctactaaaaactcaacacccaaattagaagacccctctctttttatctttctacattttatcgaaagttgacgaaaatgaccaatctcatctgctggtaaaaacgggatgactgttttaaaaagtatcgtttctgaccaaaataaagaaaaaaggactaaatatgatgtcagaatatcccgaagtgattgtacgaaccattctgtcgttcagcattctgtttatcggcgcccggatactcggaaaacaaaccatttcacagatgacgctttttgatttcattgcggccagctcgctcggcgccatcacggcaaatctgtcgtttaatacaaagctgccgattcattatactgtcattgcctacattattttcgtggcaatcatttacctggtcgcatatctttcgatgaaaaacaggtccgccaggggtttctttgcgggcaagccgaccattatcattcaaaacggcaaaatacttgagcataatatgaaaacgatgcgttataccattgactatttgaaccagcagctgcgtgttaatgacgtatttgacatttctcaggttcagaccgccatcattgaaacaaacggcagcatgtcagtggaggtcaagccggaatttgcgcccgttacaagacaggatctcggcatttttgccgggcataaaaagaacttcgccgttgagctgattatggacggccagctggtggcgaagaacctggaagaaaaccacgtatcggaaaaatggctgagaaaagaattggacaggagaaacctcaaaacggaagacgtcgtatatgcggtgcgcggaagcaacggccggctgtttgtcgatacatatgatgaccatattacatcgccgcttgataaagaataaacataacatccgcacatgtcacgggctgccgccgtataataccctataaacatccgggggtgagtccaatgcacgagcatttttttcattatacagcggtctgcggcgacgactctgttcttataaaagatctgataaaatccattaacggcgaatacagcgccgtgatctgctactcaatattggccgaaaaagcgccgaccgcagaaatcagaagacggatcgaacatatcagagaggaagaagtgcgccacctgcacgctttctcttcactgtatacttcaattaccggacgacagttgactccgaaacagacggaacattgtccgcacacatacagagaaggactgaatgcggcctttcttgatgaacagaaaacgaatgatttttatttgcatgcatccgacagagcggtaaacccggaagcgaagcgattatttgcccgcacggcatttgacgagcagcgtcatgccgtctggtttttataccatatgatccattccccttcccaccaccacacagggggaacggtatcaaacgcaccgaacaaaggctatactgaggtaaaaacagtaaataatggtccggatagataaacgctctcccgccggaagtcttcagaccgcagacaaaccccgttctttcaacatgagagaatggggtttacttttcgggctgatgttgtatgctcatccgctctaaaaacagataacttcttcattgtataatcagcaaaaacactttataataaaataaaccaactggtcggtttttaagaaaatgagccctgcttgccgggacaataacatgaatacggcggaaaggatttgtgtgaagtgacaaatacaaaaggcggtgccggaaagagcgaaaagacaaagaataggctcgtatccgcttcgcgtgacttatttgcaaaaaaaggttattcagaaacaacgattcgagacattttagaggcggccgagatcagtaaaggcaacctttatcatcattttaaaggaaaagagtttctgtttcttcatatcatggaagaggatcatcgcgtgatgatcgagacgtggagggaaatggaagctgatctgaaagatgctgccgaaaagctgacgggctttgcagagctcctcagccggatgagcatcaattatccgctgatgagggcaagtgaagagttttatgcgagtgcgttcacgtcagcggaggtcgtcaagcggctcaataaaattgatattgaatatgacgatgtgatgagagagatcttagaagagggaaatcaagacggcagctggtccattcatcatgtcgaatcaaaagtaaaaatcctgctatccgtcttttacggtttagatgtgttatataaaaacgattccattcagcaaagaaaagaattgcagaaggaagccatctccgtgtttattcacgggtcgatcaacgctgataaacagaatgacagctgacaaaggagaaacaacatgcaaaaaccgattcgagaacaaaaagctgtactcatcatcttattaagcaacatatttatcgtgtttttaggcattggattgatcattcccgttatgccgctatttatgaacgtgatgcacttgacgggcagcacaatggggtaccttgtcgctgcctttgccgtcgctcaattaattgcatcccccattgcggggagatgggttgaccgcttcggcagaaaaatcatgattctcgccgggctgtttctgttcgcattatccgagctgaccttcggattgggcacccatgtctccattttgtatttcgcaagggtgctgggcggcatcagcgccgcttttatcatgcccgctgttacagcgtatgtcgcagatattacgacggtgcaggaaagatcgaaggcgatgggctatgtatccgcggccatcagcacagggtttatcatcgggcccggcataggagggtttattgccgatcacggcgttcgcatgccgtttttctttgccgcaggcattgcttttatcgcagtgatttcctcagtctttatgctgaaagagccattgacaaaagaagaacgcgcacagcagatggaaagcgtcaaagagtcaaccttcttaaaagatttgaaaaagtcgattcatccaagctatctaatcgcctttatcatcgtctttgtgctggcattcgggctgtcggcgtacgaaacggtattcagtttatttacaaaccataaattcggctttacgccaaaagatattgccattatcattacgttcagctccattgttgcggtcatcattcaagtgctcgcattcggcaagcttgtcaactccctcggggagaaaaaagtcatccagctttgtctgatcgtcggcgctgttctggctttcgtatctacggtgatgtcaggatttttgcccgtgcttgctgtcacttgcatcatattccttgcgtttgatttactgcgccccgcactgactacttttctatccaaaatcgcaggaaatcagcagggatttgttgccggaatgaactcaacatacacgagtttaggcaccattttcggcccggctctgggcggtattttatttgatatgaatattcacttcccgtttctgttcgcaggtgtggtcttatttctcggactggggctgacccttgtatggaaaggaaaggttagtgaggtttcggagtagagtgtactcactcttctccggagctttttttgtttatgataagaaaaatgaatggattacgagaaataaatcattatttatttatctcaaaatctatactatagtaatagtaaggttaacgagcttaacaatttaatatgaatgtttcaggaagaagggttttcattgaagaaagacaaacatctccttacggatatctggtttattcttatcagtgcggcaggggggtttcttctttcgcttacagggatgtcgatcgcctggatgctcggaacgcttgccgccggctgcatcctctccatgacgcggccccgctggctgttcatggcggctgacagaagaggcattaaccgcagatggcttgcggctgggcaaatgatcctcggcatcgaactcggccagaaactgaacctgtccgtgctttcagttttacgggaacattggctgccggtaggctttatgctgattttctctatcgtgatggcgcttgtttccggatacgtgctctttcggttcagccggacggacatgatgacaagctttgtaggcacggcgccaggcggtttatccgccatgcccggtatcgcccaggaagtcggcgccaataccgcgattgtaagtctcattcagctgacgcgcgtccttttggtcgttatgacgataccgtttctcgtcattttcttatttaccaaacaaaacggtacggctcagacatcagccggagccgtttcagcaggagcctcacatccgggccttattcccgtcttgttaacggccggatttattttggctgcctggcttgcaagtaaagccgcaaaacggctgaaatttcccgctccttggctgctcggcagcatgatcggcgttgcttgtgcggaaatcggcatatccgccttggcggggaaagacatgctggcttggtggccgccacaagcgaaccaactgtcacaaatttttctcggcgccacaatcggttcaaaaatgtataaaagcatgttcagcggtgttactagagtgctgaccgtcgggtttatttcttccgtcgggttaatcgccgcaatgatcctgagcgcggttgccgtttctaaattaacaggcatctccatgattacatcggttctcgccttctctcccggcgggatcgccgaaatggcggcaacttcgatcactctgcatgaggactcgacttttgtcgttgcggttcaggtcatccggatcgttctcgtgatcgccatgctcccgcctttctatcgcctgctgcatcacctttctcagctgaaacgggcacacggcgagagagcccgggcagaaagaggaacctgagctgaataaaaaaacacgcatccatatgcgtgtttttttattttaacagctgctctccgccgccatttacagaccgccagtttgctgaaagatcgcggaacagccgttcagcaaataacagttcttcgtctgtatagcgatccaaaaacgccaagagccgcttttttatcatctcatgatatttgtgatgaaggcaatgcagctctttcccggcaggggtcagccggaagtagacttcttttttattgtcgctcagccgggttctgcgcaggaaaccggcttccaaaaacttcgcgcagcttctcgatacggtcggttttgtcgttttcattttttccgctattgatgtgacattgatcggttcatgatccccgatacaagataaaatgtgaatttccgtcaaggtcagctgaagttttttcccgttttcttcacggagttcgtccatccgtcctgctaacgacgccctgatgtcctcctgacacctctcctgctcgtggaaaatatctgtcaatccttcaagaatcatgtgttttgcatggtctggctgtcttctgtccaactgcgggtcacccttccgtattgattgtttcttttactataacgttttgttacgcaagaaacaatcatacaagcgaaaaaagggtatcagatgaatccccatctctccataccggccagaacggtttcttccgcttcacgtcctgagccgccggctgcccatgccgcatggccgtccggccgaatcaaaacggagtggacgtcatcccaatcggcacgtgtttcagaaagctccgccctgacaaactccacgctgtccgtgccaatgccggcgggaatgcttcctcttaatgacagcagcacaaaggctcctttgtgaagaaaatcatacagccgggccggccggccgtcatgaagagtcagctctatatcgggcagccgttttccgttcagcctatgagggggcagctccgggtccggttcataatgcaaatcaagcgcggatacttttcccgccaataaacggttcgactcctgaaaatccagcaaagcggtcatcgtatctcttaacgccatccctgactcggtaaaatccatgagctttatctgggtttttatattgtgcaacacttcttttcccgtgctgtgcctttcctgatggtagctgtccagaagatgaggcgccgcttttccctttatttgcgccgccagcttccacccgagattgaaggcatcctgaagccccgtgttcagcccttggccgccggcaggaaaatgaatgtgcgccgcatccccggccacaaaaacccggccggagcggtactgttcagcctgacgttcggcattgccgaaccgtgacatccacaccggatcactcaatccgaaatcagtgccgcatatttcccgcagatcttctttcagctcattttctgtaaccggctcttctttccgcttttgcggagcgtgcggagaaacgataaggacacggaaaagtccgttcgaaagagggacaatgacaaccgatccctgcagacggcacactgaaaaaaaggcggattcaggcggatttttcaaaacggcatcacaaagggttcctattaagtcggcatcagtccccaaaaaagcgatgcccgcctgtttccggacaaggctccccgctccgtctgtacccgcggcatataagctgcgcagggtgcggataccgctttcgtcccggaacaccgtctccaccccgtcatccgtctgggtaagagccactgcttctgccccgcggatgatatctgcgcctaaacttgatgcatactcctccaaaagccgctccgtttctgcctgaggcagcattaacgaataattctgcttagaatccagccgagaaaaatccagccgtgtatccagcatcgaaaaatggccggaagacaccttcgttcctttatccaaaaagcgtcccaagatgcctctcattgcaaaaagttcaagtgtgcgcggatgcataataagcgctttagaatatggcaccgtcttcttcaatcgttcaatgacagtcgttttcactccggcaagcgcaagctctgatgcaagcatgagcccgaccggacctcccccgataatggcagcctgtgtttccatcttatcagccctctttcgcattttttgttgcacacgtaacaaaataactaaaaataaaacgcgtgatttttgtttcgcgcgtaacaattctattataatctttcctttgctttttgacaatcatttctaaaaaagacgccgttcacttggcgtctgattcactgataacaccgacaatgtctttatccttaatcggtccgaaatgacggctgtcgaggctgtatatgcggttgtcgccaatcacgaaatattgtcccttcggtatcctcttgcgaccggtcgtttccttcaacgtataatcaccggtcacatggcttccggcggacaatgatgactttaacggttttaaaaacggttccgccacccgttttccattcacaaacagctggtcctccctgtaagtgatggactcgcccgggagcccgatgacacgtttgatcagcactttgtggtgcgggcctttaaacaggacaatatcgaaacggcggatcgttttgtaacgatgggaaaacttgttgaccatcagctcatttccttgtttaaaggtcggattcatgctgattccttcgactttataatcaataaaaatggcattttttaattgtatggccaaaacaacgataagcacgccggctataaaccaaaatcgttttttcaagattcctgtccccctccgtctttctcatgctgactgattctcgtctgtaaacgccgttcgatatgctttccggcataccacagcaccgcgatcaccgttagggcgcccgccatccggaaaggctgtgtaatgagtgcgtgaagatcatacccgataaagctgatcataaagatcatgaccattttccccatagcggccgctgatataaactgcagcgcccccacccgtgacaggccggcaacgacatgaaccgcagcggacggcgtaaaggggaagcaaagtaaaataaacagcggaccgaaaccgtgccgctcaacccagagcatcaaccgccttatggtttgatgcctgcggatgaaaccgaaagctcttttctgtccgaaatggcggacggcgtaaaacatcagcattgatcccgccgcagatccgagccacgacaggaaaaagccttcccacagcccaaatgcattcgtattcgccaccacaaatacaacaagcggcaaaaacggaagaaacgcttcaataaaaggcagtaaaaccgcagccgccggtccgaaagctctatagctttggaaccactccgtcagccgctcctcagtcaaatatgatataaattcctccaacgtttatactccttaacgagtttgtctatccttattctacacattatctccaaaaaacgaaaatgtttacgagattttccgacttgaaatatcgtgtaaacgagtataaaataagaacaaacgttcgcacctaagaaagaaggagtatttatgcctgacatccggaacaacacccgcgatctcatcgaaaaaggcctgtttctgcccatgacggctgccatcctgaaccgggacctcgaagcgcttgattcgtgcccgttcaaattaaaacaaccctataaacagcttatcagctgctctttaaaattagcacaaaaggatttgagtgatgttcgaaaagagttaagaaagcgtaaaatcaaaatttacgaagcggaaagagatgaagcatttacactttatatatgcaccattgacggctatgaagaaaaacaccgttatttcaacccgagaatacgggaacaggtaaccgctttattggaatattacctgtcagccgcgaccatttaaaaaagcagccgggactgcttttccttttcaaccggtaaaattcagactattcacactatacattcgacattattttctttataatcgggacacgctgttttcaatgaaaaggaggaatgttatgaaactgattcatgttctcgctgccctgccctttttcggaattctcgccggtattccatttgccaaccgggtgacgccttatgttttcggaatgcctttcattcttgcatacgtcgtcatctgggcggtgctgacatcggttctgatggctgcggtttacaaattggacaaagaaaacaaggcgggtgagacggaatgaacgcagcatttcccgtaatggccgccgtgctcctgttttgtgtatatctcggaatccgcgcccgaaaaggaaaaaagatggacctagaacaatggacggtgggcggacgcggcttcggcacgatgtttgtctttttattaatggcgggagaaatatacacgaccttcacattcctcggcggaagcggatgggcttacggaaaaggaggacccgccttttacattatcgcctacggctgccttgcctacattttgtcatattggcttctgcctgccgtatggacatacgcaaaaaaacacaaactgatgtcacaatctgatttttttatttcaaaatacaacagcccgctcctcggcattctcgtatcgctcgtcggcatcgcgtctctcatcccctatctcgtccttcagctgaaagggctcggtttaattgtttcagcaacgtcatacggacagattccgtcagcagccgcagtctggatcggcgctgtctccatcacgatttatgtaatgatttcaggcattcacggttcagcgtggatatcagtcgtcaaagatattatgattttaggcatcgtcctgtatttaggcatttatttgcccattcattactacggcgggtttacggagatgttcaaacaaatcgacgccgcaaaacccggattcctcacgctttctgataccgggcagagcgtttcgtggttcagctcaaccgtcctgctgactgccctcggcttttatatgtggccccacacctttgccgcgtcttattcggcggagcatccgcgggtgtttcggaaaaacgcgatcatcatgcctctttatcagctcgtcctgctgtttgtcatctttaccggatttgcggcgattctgcaggtgcccggtttaaaaggggcagacacggatcttgccctattaaagctgtctgtgaaaacctttgatccatggtttgtcggactgatcggatcggcgggcattctgacggcgctcgtacccggctcaatgatattaatggcctcaagcacgctgttcgccaaaaatgtgtacaaagccattctgccgggcacgcctgacgaaaaagtctcgcggctcgcaaaatacgccgtacccgtcatcgctctgatttccgtatattttacgctgaaaggcggaaataccatcgtcactctgcttttaatgggctacagccttgtcacccagcttttccccgcgcttttattcagcctgccgaagcggcggtttatcacaagccacggcgcttttgccggcataacggcgggagtcggaacggtggccttcatcacgctgactgactcaaccatcggaaccctctttccgtttcttccgcagaccgttaaagatatgaatacaggcatcatcgcgctcgttttaaacactgccgtcatgtttgcagtcagcgccgcggtcagaaaaaaacaaatcagtgcagccgaaaaagcggcttaaatggtaagatagcggtaagacacatgaaaggggaaagccgtatgattatgacaacgactgaaaccgtcgccggaaaacagattactgaggtaaaaggcttagtgacaagcagcatcgtccagtcccgtcacatcggaaaagacttgctcgcaggcttaaaatctgtcgtcggcggcgaattgaaaagctataccgagatgctggaagactccaaaaaagcggtaaaagagcggctgatcagagaagcggaacagctcggagccaacgccatcgtcggcctgcggttcgaactgaccgccggacagaacacatccgaattaatcggatacggaaccgccgtcaccgccgaatccatttaaaaaaacaagcccttttaagcggcttgtttttttatttttcacaggcaatatagtctttatcacggtcgagtcttttatttgcatcgtaaagcgcttttgatacatacggcttgtacttcgttctgccgcccttgtttttcactttcgacgaccgggccacgccgcccttatacaccttattcagcgccttgcagttttgataggttttcacctttgttttcgcttctgccgtctgcccagctccgtatgaacatccgaataccagaccgaaagacaaaagcacagctgccgtctttttcattctctatcaatcccctctcttgagtcatgcggtattgctgaacatatcatagttcaaataatctccattttcaagataaataggaaaaaagttttaatttacaccctgacacattacttttatggaatttattccaaaaccttttataatatgaattgatagcgctatctgactatgatgataggaggagaaatgatgatgaaaaaagggattcttgcgggtgtcctcacctcagccgttctattcggggcttgtgcggcggatattcccggggtaatcagccccaatacggcggaagcggcgtcccagctcagcaaaggaatcggcggaagagcctacctgaacagtacgggttctgtgctcgtcacgaaaattcagcttccaagctcgattcaggtgtcaaacgggacagcctatatttactcaggattcaccggaggcacagaggccgatatcgggcttcagtacagtgaaacttatcatgtatggaaaccgatcatgaaagtcggttcaaagggacaaagccaggtccggtatctggaaggagaaagccaattcacctatacgaaaggtttccgtcccggcagcaccgtacagctgaccatttacaaaaatatgaacggcaatacccgcgccacatattggggcacgaataatgacggatacaccggccgcatcatttcagaactcgcccagacaaatgtaggatctatcacaaaatggaaagcgctcgccactgtcgcggtcacatcagaggatcagcgcccttacatcaaatcaaacttctcaacagcttttacaaacatcacgatcgacaataaagcagtcacgcctgtgattgatacacaggattttgccaaattgacggtgtcaggcagcagcgtcagcatgtctgtcgtcaaataaagaacccgaacgcacgattcctgcatcgtgcgtttcgttatgtcaatattgccgcgggtgaaaaattggaaacacggcgggttttcatgtacactttatgtaaaccataaaaatgattgacgttcagtcattattcatacaggagtgacatttatgaacagagaaaaaaggcttgaattaaagaaagtcgaaccgaaacatttgcagcaatttaatcagctgctccgatatgttttccaagtaacgaacagcaatctgcatgaagtgggatggaaggaacccgaaatcgcttccgcgaaactccccgtattggaacaagcgcatgtattgggctggtttgacaatgacaaactcgtttcacaggcagctgtttaccctttccaagtccggatttttaataaaacatttgaaatgggcggcgtgacgggggtcggaacatatcccgaatacgccaatatgggattaatggcgaaactgttatacaaagcattagttgacatgcgtgagcgcggtcagtccgtatcctatctgttcccctactctatcccttactacagaagaaaaggctgggaaattatcagtgacaaaatgacgtttgaggtaaaagactttcagctcccgaaaatgagaaccgttttgggcgaagtggaacgcgtcgatccggaacatgaggtcattaaagaagtatacagccgattcgctcataaaagccatgcggccatgatcagaaatgaactagcatgggatgaatattggcgctgggatttagaagatcttacggctgccgtgtattatgatcaatccagacaggcaaacggttatgttctttactggattgcagatgaagtttttcatattaaagaaatggtatatgtaaatgaagaagcgcgcagaggcctgtggaactttatctcggcgcatttctccatggtgacaaaagtcgtcggcgacaattattctaatgagccgatcgcctttctgttagaagatgccgaaattaaggagacgatttctccttattttatggcccggattgtcgatattgaacaatttatcaatcagtatccctttaaaccgcaaaaagagaaacggacatggtcttttacactggaagatccgctgcttgaatggaatcagggagtctttaccgcggagatttcgcctgaaggaaaagccgttttaagccggggcggtgatgcggatgccgcaaagctggatattcagacgatgacggcattattattcgcataccggaaaccggaataccttcaccgcacaggccggatcgaatgcgcgccggacacattggaattcattgaggatctgctggagacgcaaaccccttatttctcggattacttttaataaaaaaaaacagccctgatcagggttgtttttttgtttatttccgccaaaaccctgaacagtctgccttttccttaatattatactgaatcatgctttcaagcagatcatattgcaccggatcagtccattgaattctgaacaaacgggaagtggcgctgtagccggcacgggcgatgtcgtcggcaaaatgcgcaatacccgcttcttcgggggaaacacttacatgatgcttcgctgctgcaaagccgataataaacgtgccgtgatcagtaaacatcggcgtattccacttgatctgcggttttaaaatcggaaattgaccagccgtccacgacaagatttcctccattcgcaggcgatgatcggggttgtcgattcctgatacatattttgcaaacacatccatggcaatctctcctaaaataaaatgcaattactctttacatcatcatagccaacagacggacacgatacaactctgcccgggcatgtcaatcgtaaaaagcccttcccaaaaaggaaagggcccgtcccttcacatcacagctttctctaatatctctcccccagctcccgcaaaataaagtcgtagatcattttcgtccgctcttctttcgggtacagcatgaattcctgccgcttcgggatatggctgcccatcctgtcctgaaaagtggttctgagataggcggttctgtagacttggttttcaaaagaatggtaggatacttccagctccatcgttttgccgtttgagaacgtgaccgccgtgtcatcgaatgcggtcggctgaaaatctttaacgtgcacgtgagatatccagccgcattgaggccttgctgaagaaagtgtagggaataaaaagatgtgatttgaagggtccaccataatcggcggcttgtgagaaattttaatcgcttcatatgttcccgcttttctcccggcatagcttgagccaaagtagcggcagcttctgtcaatgatgtgaatcggcttcatgctgacatacagaatgcagtctttttcaatgaccttcgaccccattttaccgtctatttcctcaggcaaaacagcgatggttgaacgatttacttcgtagctttctaagggtgcgtgtgttttctggcacataatgtgcagcctccaatccttttcttgaaaatttatactaataatctatcatctgtcattggaaaacgacaggttttttttgaatatagctaaaaatcaccttttaaagttataatttagtcttaaattactacttaaatattatttttctctttcatttcacatcatttatacatggttatttttcgttttttcgtcaatttgcaggatatgtcgatatatttccaagtattagttgtctaaaaattataaaaattaattgatttttccggcggttatccatatactataaaaaaggcattggggggattctttatgaaagagaaaaaatcgtacactgagctcatgaagtcccgcaacacgcaaaaagcaaatgaattcgatgtgacaatggccgatatttacattcaaatggtgcttgatgaatccttgtataaacgccggatcgccatgctgacagagcagattaacaaagcgcttgatgataaaaataaagaagcgttccttacgctgtccaaagaatatgccgcactcaaacagagtgaataagccaatccatatggattggcttttttatattatccgtttacgatggtgccgccgttcacatgtatcgtctggcccgtgacatatgaggagtcatcgctagctaggtatagatagctcggtgccacttcaacaggctggcccgggcgctgcatcggcacgtctgaaccaaagacttccacttcctttgccgagaagctcgccggaatcagcggcgtccatatcggccccggcgccactgcgtttaccctgatgccctgagtgacaagagattgggaaagagaccttgtaaacgtgacgatcgccccttttgtcgctgagtagtcaatcaatgttttatggcctttgtaggcggtaatggatgccgtattaatgattgaacttccttttttcagatgggggagcgcggctttcgttaagtaaaacattgaaaaaatattcgtctgaaacgttctgatgagctggtggctcgtgattttctcaatccccggctgtacgtgctgctcacccgcattgttgactaagatgtcaatggaaggaaaggcttggcccgcctggcggatgacatcgttgcaaaaggcttcgtcgccgacatcacctgcgatcagcagacactttgccccctctttttctacatattgcttcgtctcttcggcatcctgatgctcatcaaagtaaacgatgaccacatttgcgccttccttcgcgaacaaaacggatacggcgcgcccgattccgctgtccccgcccgtgataatcgcagtttttccttcaagttttttcgccgctttcggcttgtcaaacacagggcgcggatccatcacatattcaaagcccggctgccggttttgatgctgcggcggcaaggttttcttcttctgattagccaatttgatcactcctttacattaattactatattatgagtaatttgagcatcttatacgagtttcatgtatgaatatagacttattggaaaaattaagaatatacaacagaggaggtaatctgaattgacttctttttcaaacgaggaacctgcttcctattggagagcaacagctgatattccttcctttcccgccctgactgaagatacggaatgcgacgttgcggttatcggcggaggaattacgggcctgacaacggcatacgaactgacgaaaagggggttccgtgtcgctgtcatagaagcggaccggatattaaacgggacgaccgcgggcacgaccgctaaaatcaccgcccagcatgattttatctatgccgatcttattcagcagattggactgaccagcgcaaggctgtatttcgaagcccatcttcgcgctatggaagatatgaagcagatcatcaaggatctttcaattgaatgcagactgactgaacaagacgcctatatatacaccaatacggaatcaggcgtcaaaaaaatccgcagcgagcaggaagcttacactaagctcggcattgaacacgagcttgtaaaagaacttcccgtccccgttgattgcaggctcggcctcgccatgaagaatcaggcgcaattccatccgcttttatatggcgcggcgctcgtgaaagagatggtcaaaaacggggcgcagatttttgaacagacggcggcaattgacattaaaaaagaaccgcagccggaagtggtcacgaaaaacagacacggcatcaagtgcagctacattgtgtgctcctcccactttcctttttatgacggcggcgggctttatgccacgagaatgtatgccagcagatcctacgtcctggcggtaaaaccgaaacaagcgtatcccggcggtatgtttctcagcatagacgagccgtccagatcactgcgctatacagagctgaacggtgaagaactggtgctcgtcggcggcgaaagccacaaaacaggccaaggaaacgaaatgtctgaacattatgaagcgctgaaacaatttgcggaagatacaatcggagtcgaaagcatcccatatcattggtctgcacaagacctcgtcaccattgacaaaattccgttcatcggcccgatctcaggcggtgaagaacatattttggcggcgaccggttttaaaaaatggggcatgacaagctcagcgctcgcggcaaagcttttggctgatcacatccaaaacaaaaagaacccgttttccggcctgtttattccgtcacgcttccacgcagatcccggactgaaaaagctgatttcctataatgccgacgtagccaaacaccttatctcaggcaaacttgagaggccggacgcttcacctgaggctcttcagcccggagaaggaaaaatcgtaacggtcaacggcaaacgggccggtgcctataaagatgaaaaaggctgtctgcatcttgtcgatacgacatgcacccatttaggctgtgaggttgaatggaatgacggtgaacggacgtgggactgcccttgtcacggttcccggttcacacctgacggcaaggttgccgaaggccccgccatcaagcggctgaaacgcatcacccaagattgacgaaaccattctaaaacgaatggttttattttttttcgcattaaaatattttcatcagattccttcattcaagttccttccaaaccgataaaaagaaaaagagaatatctgggggaacttatattgttatttaaaaaagaccgcaaaaaagaaacagcttatttttcagaagccgatggcaaaaaacgcatcgagctttcaaatcaatatgcagatgtcaaaaagcagctgaaaatggtcaggctgggaaacgaagaactttatgtgcttgaagagctgcagccgttaatcaaagaacatatctccacaatcgtcgattccttttaccgaaatctggatcacgaaaaatcgttaatgacgatcattaacgaccacagcacggtcgagcgcctgaaaaaaacattacggcgccatatccacgagatgtttgccggtacgattgatgatgaattcattgagaaaagacagcgcatcgcatccatccacttgcgaatcggccttgaaccgaaatggtatatgggagcgtttcaggatctacttctgtcgatgatgaacatatatgaagcatcaatcccggatttgcatgagcttttaaaagcgatcaaagcgacgacgaaaatattgaatcttgaacagcagctcgtccttgaagcgttccagaccgaatataactgccagcgtgacgaacaagaggaaaagaaagcccgtcttcatcaaaaaattcaggaaacatccggatcgctcgctgatctgttttcagaaacgagcagagccgtacaggagctcgtcgataaatccgaggacatttccgaggcgtcaaaagccggcaccgtcacttccgtccatgtggaagaaaaatcaatcggtgggaaaaaagagcttgaaagccagcaaaagcaaatgaataaaatcgacgccagccttctgcagattgaagaagaaatggataagctgaatgacattgcccagcagatcgaaaaaatcttcggcatcgtgacggggatcgccgagcaaacgaatctcctgtcattaaacgcctcaatagaatccgcgagagccggagagcacggcaaaggcttcgccgttgtcgcgacagaggtaagaaagctttcagaggatacgaaaaaaaccgtttccaccgtatcagagcttgtgaacaataccaatacgcaaatcaacatcgtctctaaacatattaaagatgtaaacggactcgtaggtgaaacgaaagaaaaaatgacgcagatcaaccgtctgtttgatgacatcgtccaaagcatgaaaacgagcaaagaccagacaggtaaaatcgacgttgatttacaagcctttctcggcggcctgcaagaagtcagccgcgccgtttcccacgttgcatcatccgttgattcacttgttatcctcacagaagaataaagttagaccgaccggcctttttcataaagggccggtcttttttatgttaacttaaaatataataaagttgacatatataaagactcgctttattgtataaacatattttgataagctggaggaatacataatgaaattaatagaaatgatgcatattgccgtgtttgctgccattatgggacttttggggctgcttccgccacttttcttatcctttacgccggttccgattacgctccagacgatcggtgtgcttttatcaggaagcatattaaaaccgaaagcggcgtttttaagccaattgctgtttttgctgatcgtggcatgcggagcgcctctcctttcagggggaagaggcgggttcggggtttttttcgggccgagcgccggatatctcgtggcatatccgctggcggcattactgctgagcctcagtattcggggccttcgctcagccagcgtcccccatttgtttatcagacagtttttgttcggcgtgctcctgttgtatgctatcggcattcccgttcaggctgttatgatgcacattgacatcatgactgccgtaaagctcagcctcatctatgtgcccggagatctgcttaaagcggccgcagcctcattcgcagccgtaagaatcagaaaaacactgcaagcaagccggcttttgcctacgaaaggaagctgatgagacatcatgattacatcaacatattcagatatagccggacaaacgccggacaaaatcgcaattcagacagaaacagaacagataacctatcaaacttggaatagacttataaaccagaccgcaaactggcttggcagcctttcagttaagccggaaaacattgcgattttactgccgaacggaatgccttttttacagctattcgcaggcgcggcgcatgccggctgcacggcaattccgttagacccccgctcgacagcggcggaattcgcagatcagctgcacatcagcaacaccgatgtcgtcatcgctgaccgccggctgagcggcaggctggacggcgtcaaaacgcctgttatcctgtgggatgaatgcaaacctttaatcgaggcggagaaagcggaaggcgcatttataaaaaacgccggcctgcccttttataccgggttcacctcgggatcgaccggaaagccgaaagccttcacccgctcccaccgttcgtggctggagagctttgcttgtacgaaacgcgaattcggtatttcccctaaagacaaagtgctcgtaccgggcacgatgcgctcatcacactttttgtacggtgccgtcagcactttatttatcgggggaaccgtcatccttcaaagaaaattcaatccggccggaataaaagactggctgagacaagctgatgttttatataccgtcccgacaatgacggacgccctgctctcggccgaggcgtttcctgataaaccgctcaaggtaatttcttccggcgcggactggcccgcttggtctaaacaagcgctgtcagatcgctatcctcatttgctattatacgatttttacggaacgtccgagctgagtttcgtggcattcttatcgcctgaagacagcgtgagaaagcctgacgcggcgggccggccgtttgataatgttaaaatcgaaatccgccgtccaggaggagaacgctgcctgccgggcgaaacggggaagatttttgtgaacagcccgatgaaattttccggatatatcaacggcgcaaagcctgatgattccgggtggatgacggttgatgacatggggtatgtcgatagtgaaggctatctttatatcgaaggccgtgaaaacgggatgatcgtatccggcggcctgaatgtgttccctgaagagattgaacgtgtgctcaacggctgtccgggtgtcagaaaagcggccgtaaccggggttcccgatgattattggggcagtatcgccgttgcggtgatcgatgggcatgcaaatgtaaaggacctgaagaaacggtgccgcaaacagctggcggcatataaaatcccgaaaaaatggctgttttcagatataccggaaacagccggcggaaagatcgcccgtgccgccatacaaaagcaggcaaaggacatgatggaatggaagctgtaattacggatgcgaaacgaacgattttcgcccgggaaaacggcctgttaaaagattgtcttcctgaaaatttagcagctccgctgatccgctatttgagccggaacatggcagaagacattgatgaagttctgatcggaaatgcgacaggccgcggcgggaacctcgcccggctatcagccttgacggccgggcttcctttgagcgtgcctgggacgaccatcgacagacagtgcggttccgggctggacgccatgagaatcgcgtgccattttgtaaaagccggcgcggggagcacgtacatcgcgggaggagcggagagcagcagccgctcccctttttcttcccgcgcgcgtttttcacctgaacatatcggcgatcctgatatgggcatagcagccgagtatacggcacaggcttacgcagtcacgagaaaaatgcaggacgaatatgccctcctcagctatgaacggagcttcaaagcgcacgaagacggcctgtaccgacaggaaatcctcccgtgtcacggattcgccgctgacgaaaacatgctgaaaaagcggaacatggaacctcttatcgcccgcgccaaacccgtctttcagtccggcggctctgtcaccgccgccaacagctgcggcatttctgacggggcggcggcggtttgtgtaatggaagaacaaaaagcgcggtccctcggtttaaaaccgaaattgcgttttatcggaagcacggtaagcggcgtccatccgcattatccgtcagcagctccggtttatgccgtcaaaaagcttttgaaggagcagaacctgtcaccggatgatattgatatatacgaaatcaacgaggcgtttgccgtcaaaatatgcgtcttttcacaacagcttcaagtgccatattctaaaataaatgtccggggcggcgctctagccgtcgggcatccgtacggggcttccggggcggcgcttgtctcccggcttttttatgaagcaaaaagacggccggatgcccgctacgcagcagcagcgatcggcagcgggggcggagtcggactggcgcttctctttgaagtgttaacgtaacggcagtataatagatgatattgataaaaaatgatcggagtgaacacattatgactgccgtttgtttagtaagacatggagagactgattggaacgcccaaaaaaagcttcaaggcaaaacggatattccgttaaatgcgacgggagagcgtcaggcgaaagaaacaggagaatacttaaaggttttcgaatgggatgtcatcgtctcaagcccgatgaaacgggccagaaaaacagctgacattattaacggatttttgaatcttcccgttgtcgtcatggaagatttcagagaacggagctacggtgatgcggaaggaatgtctttaccggaacggtcagagtgctacccggataaaaactacccgaacatggagaccgcagaggaactgacagacagaatgctggccggtttagtaaaagttcaggaacggtttcctgaccaaaaggtactgatcgtcgctcacggcgcagccatccacgccctcttgtctgccatttctgacggtgacaccgacatacaaaatgcaaagcttgtcaatgcatgcctgagcaatatcgaacggattgaaaataagtggcgcgtcaaagattacaatgtaagcagccacctttcggaatcataataaaaaggcccgcactcagtgtcgggcctttttggcgagcatttttttctgaagatcatgtaatatggcgtccgcaccgtcaatactccgccgctccgtccaaaccgccctgtccgcgcggtagacgcgtccatttttcacggctgtcagctgtttccagagcagatgtttttcgagttctttctctccgcccaacagcacgatgtaatcaggatcgatacgcaaaagctgcccgggcgtcattttaatatgatcgtttttcttcccggaagctgtctggattgcatatgtaaaccccgtgagcgccaaaagccgggacgtgaaaaactgatcattctttacggaaatgccgccatttgcagcgtcgattaataaaatcgagccgccttctgcatccagctttcttttgatttcattcaggttttcttcctgagccgataattgtttctcgatgatgtcctttttaccgaccgctttttcaatggtcaaggcagcgtcaaccgcatcctgataatccgcatcttcatttttcaaagcgattgtcggagcgatcttcgtcagcttattgtatatccctctgtgcaggctagaatctgcaatgatgagatcgggttttaaagaagcgatctttttcaggtcgggatgtgatcgggtgccgacagactttgacgggtcatcggccgcagccgccggctttatgccgagatcatggagggtatcaataaagcccggattcaatacggcgacgcgctgcgggtgcgctgccacatgcgcggtcccgagatcatgtctgatggcggtctcatgttccggttctgaacatgccggtatgaagaggacggataagatcagcagcatactgaaaatcggtttcatcagttccccctctttcgtttttccgcaattatatcattgacaatatcaacatcaatgatattcattatcattatttttataaaatggtttcacagcttttctcggtcaagaaagccaaagactgatttcgcttacgtttccatcagtcttctgtattcaacaaaagatgacatttatcctgtttttggaacaacccccaaaaatggaaacaaaccgttcgacccaggaaacaagcgagtgattgctcctgtgtacatttactcatgtccatccatcggttttttccattaaaatttaaatatttcgagttcctacgaaacgaaagagagatgatatacctaaatagaaataaaacaatctgaaaaaaattgggtctactaaaatattattccatactatacaattaatccacagaataatctgtctattggttattctgcaaatgaaaaaaaggagaggataaagagtgagaggcaaaaaagtatggatcagtttgctgtttgctttagcgttaatctttacgatggcgttcggcagcacatcctctgcccaggcggcagggaaatcaaacggggaaaagaaatatattgtcgggtttaaacagacaatgagcacgatgagcgccgctaagaagaaagatgtcatttctgaaaaaggcgggaaagtgcaaaagcaattcaaatatgtagacgcagcttcagctacattaaacgaaaaagctgtaaaagaattgaaaaaagacccgagcgtcgcttacgttgaagaagatcacgtagcacatgcgtacgcgcagtccgtgccttacggcgtatcacaaattaaagcccctgctctgcactctcaaggctacactggatcaaatgttaaagtagcggttatcgacagcggtatcgattcttctcatcctgatttaaaggtagcaggcggagccagcatggttccttctgaaacaaatcctttccaagacaacaactctcacggaactcacgttgccggcacagttgcggctcttaataactcaatcggtgtattaggcgttgcgccaagcgcatcactttacgctgtaaaagttctcggtgctgacggttccggccaatacagctggatcattaacggaatcgagtgggcgatcgcaaacaatatggacgttattaacatgagcctcggcggaccttctggttctgctgctttaaaagcggcagttgataaagccgttgcatccggcgtcgtagtcgttgcggcagccggtaacgaaggcacttccggcagctcaagcacagtgggctaccctggtaaatacccttctgtcattgcagtaggcgctgttgacagcagcaaccaaagagcatctttctcaagcgtaggacctgagcttgatgtcatggcacctggcgtatctatccaaagcacgcttcctggaaacaaatacggggcgtacaacggtacgtcaatggcatctccgcacgttgccggagcggctgctttgattctttctaagcacccgaactggacaaacactcaagtccgcagcagtttagaaaacaccactacaaaacttggtgattctttctactatggaaaagggctgatcaacgtacaggcggcagctcagtaaaacataaaaaaccggcgtcggccttggccccgccggttttttattatttttcttcctccgcatgttcaatccgctccataatcgacggatggctccctctgaaaattttaacgagaaacggcgggttgacccggctcagtcccgtaacggccaagtcctgaaacgtctcaatcgccgcttcccggtttccggtcagctcaatgccgtaacggtcggcggcgttttcctgataccgggagacggcattcgtaatcggatcagaagcaaaactgagcacggatataagcagcaataacagcgggagagcggccagatcttcaggcccctttatatgaagcattcggccaaaggatttggacatccgcctgtaaagcttgtcaatgatatagaacccaaccaatgacagcagcagatacccggccagtccgatgtacacgtgcttcatgacatagtgccccatctcatgccccataatgaacaaaatttcctgatccttcagtttgttaagcgtcgtatcccacaaaacgatgcgcttattcgagccgatgcccgtcacatacgcattcagcgcattcgttttctccgacatatttacttcataaacatggctagccggaatatcggccttgtcggcaagcgacaaaattttgctttcaagctccttgtctttcaacggatagaaatcattgtataaaggatcaatcacgacaggctgcaggaaaaacaaaaacagggtaaacggcaccgtaagacaccaagcgtaaaaccaccatttttttgtatgctttgtgatcagccagtaaaacacaagcacacacacggcgaacagcggaaaactgatccagaaatcaatgacatgatctctgatccagctggctgttgtctgcgtcgaaatatgatacgcaagcgaaacccggtatccgatccactcaagcggaagcgaagccgccgtaacgatgagtgaaatcacaaatacgaagcttacgatttgcagcacccgaaagcgcaccgctgcttccagccattgctttatttttttggcaagccccgtaatcagcagcagaaaaaataaaaaccaatctaacggcgccccgataaaaaataaaaaatcctttacatttgaataattttcagcggctgccaggcggcccgggtccataaacgaggacggatcagctttcgttccctttacggcctccgggacggcggagtctcctgtcataaagaaataccaatagaaaaaaaggccgtacagcacataggcaagtcccgctgccgctatccatttgcgcatggaagtctccctccttacccttatgacttactcctattgtaagcataaatgcaaataaatagaaccaagcctccaaaacagatgttaatcttttcacaacagaaaagaatggaacaacaggaagcgggaaagactaaaagacggagtgatgaatatgaaaaaaataatcgcgtttatcgtagttatcgcccttttggttattgctttcttctatgtatacagccggaccggcgatgtatttacatcaagcaacgcagatctgattattctgtctgagcacggaaaaaaagaaattaaaattaaagacaggcagaatgtaaaagatatgctcgatatcttgaatcaaggaaaacaagtcaaactgaccaaaagcgtgtctcctgattacgacggaacggtcaaataccatgaagaccgttttgattcattcagcatgtggctcgaaagcggcaattatatgttgtacaagtataaaaacacgtattacaaactgacccggcatgatacgaagcttgtgcaaagcatcattaaggaagaatcgcagagctgaccggatcagttcatgtaaaagcgaagcccccggcttcgcttttcgtctgtcatttcggaagcatgtcccgtaccgcccgtctcagcagcttcccggtcgcattcttcggaatctcatcaagaaaaatcacttccgccggacgcttatattttgccaaatgctgctcacagtaatcaaaaacggcctgttctgtcagttcaccgtccgcaggcacaatataagcatgcaccgcttcacccgttttggcgtcgggaacgccgatgaccacggcttctttaatgccctcatggctgtagagcacttcttctacttcgcggggatagacgttgtaaccgccgacaagaatcatatctttttttctgtcgacaatataaaaataaccgtcttcatcgcgtttcgccaaatcacccgtgtacagccagccgtccttcagcgcgtgctccgtctcctcgggcatcttgtaatagcccttcatcacattcggccctttcacgatcaattcccccacttgatggtcaggcagttcgcgaccgagcgtatcgacgactttattttcgacatgcaaaatattcgtcccgatcgagccgggctttctcccccggtcaaacggattgaaacaagtaaccggagacgcttcagaaagtccgtacccctccagaatggtgacgtcaaaggtttgttcaaatgtctgcaacagagcgaccggcatggaagcgccgcctgaaatgcacagtctgacggacgcaaaatcctccgccttgccgtgctcatattgatacagatagttatacatcgtcggtacgcctgcaaaaatggttgcctgccggcgtttaatcagtttaaagacagatgccgggctgaactgcggttcaattaatacacacgctccgctcatcagaggcgcattcatacaaacggttaaacaaaaaacgtgaaacatcggcagtgcggccacaattttatctttctcattcattcctaagtatccggcgacatcatttgcgttggaaaaaagattctgatgggtgagcatggcgcctttcggttttcccgtcgtccctgaggtgtataaaatgacggccgtatcatctttggacaataccggataggttctgctgcgctccgccggacggagcatttttgtaaacgttgtcatttttaagcgcaattgagggtcttctgtcgatggagcgttctctgcggtctgactgatgatgatatgctccagcagcggcagcgagccgtgcaggctttcaaatacgggaattaaaagatcaatgccggcgatcgctttgacatcgccgtttttcagcatatacgcgatttctgaaggtgtgtatgccggattaacaggaatgacgacgactcccgctttcaacgcaccgataaacgcaatgacaaaatcaggcgtatttccgagaagcagcgcgagatgatccccttttttcagtcccctgtcctccaatccgtttgcaaatgcttcgattttacctgccagctcctgatacgtcatgtactgatcttgaaacagacaagctggtttttccggtttctgcgatgccgtttcttccaatttggaaaccagattcattttcccacccctttaaaaatgtaatgaatgaatagtcattcatttctccggaataaatgttcactttcattatagaaaaatatagaaaaacactcaagggcaaaaagccccgagtgccgtaaaaccggaaattataattgtttcagcgcttctctgaccggcgtgctgcccgccgtcagatcgaacgctttttcatacgtattcggttcatcaagggatgcgataaccgtattggcgacatcgtctcttgaaatggaccctctttctaaatcagcggcggctttaatattgcccgtgcccggatcatttaataacccgccgggacggataatcgtatacgtcaaaccgctcgcttcaagaattttgtccgcataatgctttgcaacataatacggcttcagtgcttcattccaattggcgcggttatgagcctgaagggcgctcaccataataaaccgcttgatgccggctttctttgcagcttctaccgctttcgccgctccgtcaagatcaatcaaaagcgtcttatcgtgtccggtgcttcctcctgatccggcggtaaatacaatcgcgtcacagccctcggcggctttcgcgatgtcttccgcacttccttccagatcggcaagaacggcttctgttcccgccgcttgaagcgcttctttctgctcttctttccggaccattgcccgcaaggtatgcgtaccgtctttttgaaacagcccggtcagccgctgtccgatctgtccgttcgctccgatgagaaatactttcatcatgatccctccttatttattatggttctatcatttcacaagagcggccgccctttcaaatcatgcgatcggcaaatgttctaataaatcaattcgaggaaatcttccagctctattttgccgaaatactgtttcagatcaatcccggccagcgcctctctgatagcggttctgtcatattgttttccggtcagcgcctgttcgatttcacttacatctttcgcaccgaagaagtccccgaaaattttgcagtcttgaatgattccttttttcacttcaaggcgcagatcaatcgacccgaccggataacgtttggaatgctgaagattaaatgccggcgacctgccgaaattccagtcccagttttgatagcgctcttcagaaatcttccggatcactttccagtcttcatcggtcagcttatattccggcacttcggaaagatcatttgtattaaaaatatggtgaagcaggtgttttttgaattcatcagccgtcattttgtcatcaagaaactcgctgatgttggcgacacggcttctgattgatttaatgccctttgattcgattttgtcttttttcactttcagcgctgatacaacatggtcaatggcggaatccagcattaatgttccgtggctgaaaatacgccctttcgtcgaaaattgagcgttgccggaaatttttctgccatcggcgacgatatcgtttcggccgcttaattcagcttcgaccccgagctggcgcagcgcctgaatgacgggttcggtgaattttttaaaattgtgaaagctgtctccgtcatcttttgtgataaaactgaaattcagattcccgagatcgtgataaaccgcgccgcctcctgacagtctgcggacgacgatgattccgttatcctctacgtatttcgtattaatttcttctattgtattttgattcttcccgatgataatcgacggctgattgacataaaacagcaggtatgtctgttcagggtcgagatgcttcacgcaatattcttcgattgcgaggttgatcctcgggtcggttatgttttggttgtcaataaataacatggtgctcctcctttatttctcccacttcaatccggaagccgcgatcgtcacttttcccccgaatacggattccgcttcttctttcagctttaggtgctcgccgaaatgcggcagatgcgtgagaatcagttctcccgctccggcctcccgcgcgatacgtccggcttccgtgctgttcatatggcctgccggcgcgccgtcttggtgcgcgtaaaaattgcactcgcaaatcagcagatcggcattttccgcaaacggaatgaacgcgtcctgatagcttgaatcagccgtatacacaacggttgctgtaccgtcggtaatacgcatcgcataacaagtgaccggatgcaccgttttcagaaaggtaatggtgaacggcccggcagaaagcgggcggtccggctgataagccactccttttgtatgcgttttatatgtaagacgctcaaactgttctatatcagcatcatgcccgtaaatcggcagcgcatccgttccttttccgagaaaagagccgacctgcttggcaaattgaagcggcccgatatcagcgatgtgatcatgatgataatgagacaaaatgacggcatcaagctcttctgccggaacataggcaaacagctttgataatacggcgcttccgcaatcgaccagaagagaataaccgccggactgaaacaggtagcctgaagttgcttcatttgcggccggaaacccgccgcagcatccaataactgtaactttcatatcgtcctccgaatgtttaggataaaaagactctttccttcaatatacctatttttcgtacaaattgcatgttttaaacattgtgtcaaaacagccgttgattttcacaaactgttataatacaatgtaaagacaaaacaatgaaagagggatgggtatgttggataaaataacagaattttttagaaatctacccggtaaaaagtgtgcggaatgcggcaaagaaatagctgaacagcatgaatgctatggaaatgtttgtgacaattgcttgaaaataaaggatatgtaacaaaagggcgctgcacattcgaagatgtgcggcgcctttttttacggccggtatcatactttctgaatagggcgttattcaccattattagcaataatctgtatgttttgaacaattcagtattttcaatctatatttttctatagacggattgttttcttttctattataatttgttctaatagctatctttttagatacttattgcacttttttcttcgggaggtaatctatgaaaaaattacgttttggattagcgacgcaaattttcgtcggactcatactaggggttgtagtcggtgtcatctggtatggcaatcccgctgttccaacttttttacagcctattggcgatttgtttttacgcttaatcaaaatgatagtgattccaattgtcgtctccagcttaatcatcggcgttgccggcgcgggaagcggaaaacaggtcggaaaattaggcttcagaacgattttgtattttgagatcattactacttttgccattattctcggactcgctctggcgaatctttttcaaccgggggctggcgttaatatacatgaagctcaaaaaacagatatcagtcaatatgttgaaacagaaaaagaacaaagcggtaaatccgtagcggacacattcctgcatattgtaccgacaaacttcttccagtcattggctgaaggagatctgcttgccatcatctgctttaccgtgctttttgcactcggcatctcggcaatcggagaaaaaggaaagcctgtactggccttctttgaaggtgtttctaatgcaatgttccacgttgtgaacctggtcatgaaagttgctccgtttggcgtttttgcattgattggtgttaccgtttccaaatttggactcagttccctgctttcactcggtaaactggtcggtttagtatatgtagctctggctttctttctcattgttgtattcggaatcgtcggaaagcttgctggggttaacattttcaaattccttgcctatatgaaggatgaaattttattggcgttcagtacgtcaagctccgaaactgtacttccccgcgttatggagaaaatggagaaaatcggctgtccgaaaggtattgtttcctttgttgtgccgatcggatatacctttaacttagacggttctgtgctgtaccaatctatcgccgctttattcctcgctcaggtataccacattgacttgtccatttggcagcagcttacccttgtgctcgtcttgatggtcacttccaaaggaatggctgccgtgcccgggacttctttcgtcgtcctgcttgcgacactcggcacaatcggcgttcctgcagaaggtcttgcattcatcgccggtgttgaccggattatggacatggcccgtacggtcgtcaatctgaccggaaacgcgctggcatccgttgtaatgtcaaaatgggaaggccagtatgatcccgttaaaggcgcgaaggtcatgagcctcgccaaaacagaacaaaacaccaccatttcaggttaaacgaaaaacctgcacggaaattattccgcgcaggtttttttatgccatcggagacagaacataccggtgcaaaagcttcgccgtattcagaagcgataattcgtgcgtgcgttcaaaggcgtgtgaagcgtcaattcccgggccgatcagtccgtggacaatgtcatggcccgaacggatggctgctgaggcgtcagagccgtaatacggataaatatcaagctgatagtcaatgccatagcgctccgcaagcccggccagatgttttctgagctgataatggtacgggccgctcgcatccttcacgcaaatggagacggtatattcatccgtagactggccgtcgccgattgctcccatatcaacagccaagtattcgacagtttcagggggaatgttggaattgccgccgtagccgatttcttcattattagagatcagaaaatgcgttgtatatggaaggtcgatcttctcttcagtgatgcggcggattaaatccaggagcagagccacactcgctttgtcatcaagatgacgggacttaataaaaccgctcggcgtgatctgcacgcgcgggtcaaatgagatgaaatcgccgactctgatgccgagatcggacgtctcttctttcgtccgtacatgctcatcaagacggacttccatattctcctgattccgctctgccttgccggcatccttgtagacgtgcactgaagtctgatgcattaagatggtgcctgtataggttttgccggaagaagtttgaatctcgcaatattctccttcaatcgagttgtatctaaaacccccgatcaagtcgatcttcagcctgccgtccgcctttatttcctttaccattgcgccgagcgtatcgacatgcgccgtcagcagtctgtgtttcttgtcatcacggccgggaattgtgacaaaaagaccgcctttgcggtttctgtaagatgagacgccccagtcttttaaaagactttctgtatatgcgataacctcgtatgtattgcccgtcggactcggaatcgacaccagtttcttaatcagttccatcgtatgtttcatattttccacaggtcattcctcctatcaattttattcttcttaaaatatactcttttgatccacaacccgtccaatcttttccttctcttttttcataagatgaagggagcatgggaataggagggaaatgtatgatcagccgtaaaccgcacaagcggaaaaggtgtcgtaatgattggtttaaggattggtttgaagatgattggtttgatgaagactccttctggtgctgtaaaaaagaagaagaaccatgtaaaaagaaaaaagaagaggaacattgtaaaaagaaaaaagaaagaaagcatcatcattcatgccgccatcactgccgtcactgctgccgtcattggtaatgtttcacacaaacccgtttcacaaatagatgtctcatgctccccaaccagcggatgctgcttgggtttttttattaaaattagtaccaagtaataatatctggtgttataatctgattataaaggagtgaatcataatgtcaaaatctaaaattacagcaatcggtacatatgctccggcacgccgattaacaaacgcggatttggagcgcatcgtcgatacatctgatgaatggatcgtccagcgcaccggcatgaaggaaagacgcattgccggcgaacatgaattcacatcggatttatgtattgaagcggtgaaaaaccttgcagaacgatacagcggaacccttaatgatgtcgatatgatccttgtggctacaacgacggcggactatgcgtttccaagcacagcggcacgcgtgcaggcttacttcggctggccgcacacgggggcgcttgatataaacgccacatgcgccgggctcacttacggccttcagctcgcagacgcattaattaccgccggaactcatcaaaaagtgatcgtgattgccggtgaaacattatcaaaagtaacggattatactgacaggtcgacctgtgtcctgttcggagacgctgctggcgccctattggtggaacgtgatgaagcagctccgggctttttggcagccgtgcaaggaacggtcggaagcggcgcggacgtgctgtatcggacgggactgagcgctgaattaaacggccagccgcttaagggcggaggaaacatggtgcaaaacggccgagaagtatataaatgggcggtcagaactgtaccagaggaattcaacgtccttttagaaaaagccggcttttcaaaagacgatctggattggttcgttcctcacagcgccaacatgcggatgatagaatcaatctgtgaaaaacttcccttcccggctgaacggacactgacaagtgttgaatattacggcaacacctcatctgtttctattattctcgctttggatgaagccgtgaaagcgaaaaagctgtcggaaggccagaccctggtattattcgggttcggcggcggattgacgtataccggactgttggtaagatggggattttaataaacaaaagcatcactctctataatgagaatgatgcttttttcagattgatcaataaaaaacccgcaagtccggcaagtgaaaccagggcatcgtttacgtgtaaatgtcatgctgcccgctcctatgctgacaggcgctgtaacggggttcatctgttcgggacattcctctttaacgtgtttaaccgtaaaaagccctttcggaagcctgaacctctgtatcttctcttttgaataaaagaggccctgagcatttgctcagagcctctatttcttatgctgttatttcttcttccgctttgtgttcttttttgctttttaccgtaaagtacacgatggtcagtgtgatcatgacaacggcgatgcccaatagaaccgatgcctgctgccacatgtagccgtaatcgccatttgaaatgacggcacggaatccgttgatgctgtaagtcatcggcagtgcgccgtgaatcacttgatagaatcccggcaggagttcgagcgggaaggttcctccgcttgccccgagctggagcaccagaatgatgacagcgataaagcgtcccggatttcccatcgttgtcgccaataattgaatcatggacaagaacgcgatgctggtaatcatcgtaaagagatagaatctccaagtgctttccacatcaagcccgattccttttaacagaaccgttgcgacaataacggattgaatcagtccgacaagcagaatgacgctgaatttgctgaggaaccattcaaaaccgtttctcggacgccctgaagcttcactcagagggaatacgaccgtcagcatcaatccgccgacatataagcccatagagagaatatatggcgtcagtccggtaccgtagttaggcacggaatgaatcgcgttatcgtccgtttttaccggatcggcgatcatgctgtacgttttgtcatctgtcttaatgtctccggtttgatcggccgcatctttcagctggctggacaattgtccggtaccgtctaaaagcttgcttaaaccggtgccgagagacgcttgaccctgctcaattttggatgagccgtcatggattttgttttgcgcatccagcagcttcgttaagccgcctgacacttggccgctccctgacactagcgcttcagatcctgatttgagctggccgaacttgctgttgtattcgccgataccggccgtcagtttgttttggctttcaaaaactgtctgtgctccgctgtacaatttatcagttcccgctgtcagctggttaatcgcgtcttgtaccgccgctgcaccgttatacagtttcgaagtggactgaggcagtgctttcagctgatcagccttcgcttttacatcttggagcgcgcttttaatgactgacatatccggaagctgaatatctccgccggacggaagctggctgacgatattgtctaaatccggaaggtcagctttcggaagcttctcattcagaagctgaacaagttttgctttttgctcatccgttaagaaatcactgtcctgaatcacctttttgaccgcgttatcccgggcatcgaggctgtttttcagatcagaaagcttcttcttaaactgctgcaattccttttcagtctgttcgagctgcccaacggctttttctatatctgacaggttgacggaattgatggcatcttcaaatgccgccgctttttgcgatacttcctgcgccttgctgtttaacacgcttaaaccattcgttaaatccggaagcttttgctggagctgcttatgcccgtcaaggctcgttttcagcccgctggccacttggcctccgcctgaagcaatctgtcctgatttgtcttgaatttcggcgcttgcgctctggagttttgcgatagagctgtcaagcgtttgaattccgcttgtcacttttgctgcgccgtctgtaagctgctgcgttttatcgctgatggttgcggtgctttcagtgagtttcgctaaattttccttcagcttggcgctgccgtctttcgcgctttttgtgccatcgtctattttcttggcgccgctgctggctttgccgagtcctttggcaatatctttaaagttgtcaaaaatgacttttgcgtattgctccgtcacttctttcgacactgaggctttcaatttatcgatcgccttttcaccgattgtcgcgccgacatagttggaaccggcattcgtatgatacttcagatccagcttcttcggatttttatccattaccgtgctggcgtttttagaaaaatcttcaggaatctcgaccaataaataatatttagcatttaataagtcctttagcgattgatcaagatcgcttgaaaaatgccaatcaaaattatcatttttctttaactcttttacaagatcgtcaccgatctgaagatgtttcccttcgtagtctgcccctttatcctggttgacaacgacaaccggcagctgatccaccgtgccgtacggatcccagtacgccttcaaaaacactccgctgtagatcagcggaacgaataatatggcaatgatggggattaacagtttcttgctcgttacaatgtctttccactggctttttattgtattcaaccctgttgcctccttccgcaaactgactcatttgacaaaacggtcacggcacctaaaaagtgaaggatcatctatttagataatccttgaccgacatagatttccagcaattcggcgatcgtctctttttcaagaggcggatggtttttttcccagtcaaatatcagcgcgatgtagagtttgagcatcacaaaagcggtgagctccggatcgcacggtttaatgctcccgttttcaatggcacattctatcttttctttaatgtatgacagaatggcccgctccattttcgcaatgacatcctgaacggcaattgtaccaatctcggcgttctcctgaaaaattttaatagtcagctggtgtgtttttctgaattccaaaatcgcgaccagcgcccgatggacattttcatgaaatgaaagctccggtttcatcgcttcgtcagcgtgttccttcatttctcttaaaatagtggtgaaaatatcatcaaacagctcttctttgtttttgaagaacgtgtagatggttcccttccccacgtttgcaagctttgccaccagatccattgtcgttgctttgtagccgaattgcgtaaaagatttcgttgccgcttccagaatgagctttttccgatcgacggacatgtttcccacctcgttaaattgaccgtttgaacgttttagtcattttgtacataagataacttatcacagtcgcgaagaagattcaaatgttttttctctataatggtgttccctttacagaacgggaacatgcaaaaaaaaacccccgttttaagataacggaggctggtacgtttcaaataaataagccagtgaatcatatactgcggcttttccctggtcgatacagtcggggatgcccaccccttcaaaagatgcgcccgtcgcgtatacacccggataggaagctttcagctcatctctgaactctttgatgcgctctttatggccgacatggtactgcggcatgctttcgttccagcgggtgacacaggtcatttccggttcgccattgattttcattacttttttcaaatcttccattacgattttaatgatctcgttatctgaaagatctacgatggattcatctccggcctttccaacgtacgccctgagaagcgttttgccctccggcgccgcgtgcggccattttttattcgtccatgtgcaggccgtgatggagaaatcgctgtttcttgagataacgaatcccgtaccttcatgctccatcttgacggctccctccggaaaacctaaggcgacgttggcaacggacgtagaatgcatgtctttgagacatgacaccgccggcaaatcagaaagcattttcgccgcggctttatgcggcgctgtcacaatgcatccttccgcatgcagcacactgccgttatcaagcgtcacggaatatcccttctcctcgcggccgatatgggtaactttcgtgcctttcatcacctttgtcagtgtaagctgcttttccagctcctccaccaaagtttgaaggcctgtcgtcagtgttaaaaactggccctgctttttggccgtcagctgctgtcccgaaggctgcggacgcgattttttcatgccgagaatcagacttctgtgcttttgctcagtctgatagaattgcggaaacgtggacataaggctcagcttatcaatatctccggcataaatcccagacaacagcggttctattaaattctcaacaacttcgtcaccgacgcgtctgcggaaaaactcacccagagactgatcttccttcggtttgctcgcaggcaggacaaaatccagcgccgcccgcgcttttccgggaacagaaaataagccggtggagatgaacggagcgatttttgtcgggatgcccatcaccgcgcccttcggcatcggatgaagcgtctcgttgacaagcacgtaagactggccggtcgcattgttgacgagcagatgctcaagccccagatccttcacgagctgcggagcgctttttttcctttccaaaaaagaatccggcccccgctcgatgatgtagccgtctttatgggccgtctgaattttcccgcccgctcgcgggcctgcttcgatcaaagtaatctcaagcggcagctgtttttccttgatttctttttccatgtagaaggcggcggctaatcccgttatgccgccgccgatgatgaccagatgttttttatcgccactcatttttatcgccttctttaccgtttaattctacttgtccagctctttcagcacgaccgctgcaagcgcgtcgataaattcaggctgtgcgttcggcatagccggacgatagtagcttgcgccgacttcatcggtcacagctttgcattcgtaatcattatcgtaaagcacctctaaatgatcggcaacgaagcctgcgggcacatatacaaatgctttataaggatgcttttgatacagctcgcgcgtgagatcctgcacatccggcccgagccacggatcaggggtgttcccttcgctctgccagccgactgcgtaatcggtaattccggcgccttcggctatcagttttgcggattcctccagctggtcaggatacggatcgccgtattctttaattttttcaggaaggctgtgcgctgagacgatcagcatcgcatcatcccgttcttctttcggcatggagtcatacgttttcttcacttgggtgacccaataatcaacgaatttcggttcatcataccagctctcaaccgacttgatggtcaagccgccgagcttgtccgcttcttctttcgcgcgtttgttgtaagacttgacgctgaatgttgaaaaatgaggggcgagcacaaggctgacagcttctgtaatgccgtctttatgcatctccgccaccgcatcttcaataaacggttcaatatgttttaatccgatgtacactttgaatgttacatcatcctgaatttcatttaaacgctgtccgagcttctccgcctgctcctgcgtaatttttgcgagtggcgaaatgcctccgatcgcctcatatctgtcttttaagtcttgaagcatatgcggctccggctttcttccgcgtctgatatgtgtataataacgctctatgtcctcttctttgtaaggcgttccgtaagccatgacaagaagtcccattttctttttgctgctcattttgttaaacacctcttttgatggtctgtctatcttgattttgacaggaaaatctccttataaccaacgatctgctcaggaagatcgttccgtttttttggctgcggagtattcatgcacaaacgccgtcagctttttcagcgtatccggatttacatcagggaatacgccgtgtcctaaattgaaaataaaccggtccgttttcatgccctgatcaagtatcgctttcgctttttcctcgatgacttcccaaggcgcaagaagaagcgacggatcaaggttgccctgaaccgtttttgtgatgccttgttttctggcgtcatctatgctgagtctccaatcaagaccgacaacgtcaagaggaaggtcatgccaatctccggccagatggcttgcgcctacgccgaacatgatcagcggaacttgttctgctgaaagctcccggaaaattctgtccatcaccggtttgatatacatccggtaatcttcgcggttcagcgcgccgacccatgaatcaaaaatctgaatggctttcgcgccggcgttaatctgcgctttcgcataaacgataatcatgtccgcgagcttgtccatcagcatctgccacgcttgcggcatactgtgcataaacgcttttgttttgttgtaatttttagaaggcccgccttcaatcatataactggccagcgtaaaaggcgctcccgaaaaaccgatgagcgggacattcagctgttcgtttacgagtaatcggatcgtttccagcacgtaaggaacatcctgttcgggattcagttcgccgagcttgtcaatatccgcagcagagcgcaccggctgatcgatcaccggcccgattccgtttttaatttcaacatccactccgatataaggaagcggcgtcataatatctttatataaaatggcagcgtccactccgtactgctcgaccgggagtcttgtcacatacgcgcacagctcgggctgatgcgtaatttcaaccaggccgtacttttccttcagcttgcggtattccggctgcgacctccccgcctgtctcatgtaccagacagggacgtgacccgctttttctccccgtgccgcttttaaaaacgtatcattaaacgcttctcgtttactcatctgaatttccacctttcctcctgcaaccatacgttcgtgttcttcgcccattacactataccttgttttttcaaaatggtatagaattgaggcttaatgttcaaaaaatcgccgaattcattatttaagaagaaaaaagcttcggctgaacgtattccgttccctctccttcttgattcgtctgtgtattatatggaacgaccttgtatgaagcccctgagaacagattggcgtacggaatgtcaaagctgccttttcctttcaccgaatccagaagcttgtcttttccgtctttcttttcatatattcggtaaacaacccgatcatccttttgagcatcccattttaattgaatcgtaatcaatcccatcgccttaaatgtataacgggccgacagggacttcaccgccttaagctcaatcggactgcccagttctttcacattttcaggctttttgaatgttttgccgctttcttccgcttttgtgacgatatctttaaagagccggaccgggtactggcttccgcctttcaggtaatgggttttatccgttttgtcatagcccatccaaatggctcccgtcagtccgggagtgtatcccgcaaaccaggcgtccttcgtggcaccggggacgccggtaaatgacgtcgtgccggttttccccgccatgtcgccttgatagcttccttgtgaagcggttccttcttttacgacctgctgaagcattctcgtcatattccatgcggtctgtccgctgaagacgcgcgttttgccgtttttaggcccggatatcgtttctccgtcttcgtccgtgattttctcaataaaaaatggcttcgtatacattccgttcgccgcaaaggtatgataagctccggcaagctgaagcggggtgacgccttctgacagaccgccaagcgcaatcgcgagcccgttgtcagaaatgtttatgccgtttttatcaagatacgattttcccgtatccacgccgatctgcttcaatgtccagacagcgggcgcatttatgctgtatgtgatcgcgtcctgcatcgtcacttgccccttgtactgcccgccataatttttcggttcatacccgtcgtaagactgcagtttgtcttgaagaagcgaatacggtttgaacttgtcttcctgcatggcgggcccgtatacggcaagcggcttaaacgttgagcccggctgccgcggcgcagttaccctgttgtatccttttgtcacgtagtcgcgcccgccgaccgccgcgcggacgcctccggttttattatcaataaagacggcgcttccctctgccgcctgatccgtccccggaaaatagccgttttccctcattagtgtgtatgccgttttctgcagcttggaatcaagcgaagtccggatcgtatagccgccttgaagaagctgttctcctgacatcgaataacgggattccgcctccttgatgacaagatcgatataactgtcaaaccaaggcgtttcagatgttttcttgacattaagccccaatgtcctgccctgggctctgacggcttctttggcgctgatatagccttgatcgttcatcatggaaagaatcgtatcgcgccgttctttatttttgccgggatgctgaatcggcgaataaagggatggcgccttcggtatggctgccagaacggcgccttctgcaacggttaaatcttttacttctttattaaagtagtagtgagacgcggcttgaatgccgtaaacgccatggccgaaatagagctggttcaggtacatttcaagcagcttatccttgctgtaatcacgctcaagattgatggcaatgatgacttcttttgtcttgcgcaaaaatgttttatcattagtcagaaaaatgtttttcgccagctgctgggtgatcgtgcttccgccctccaccttgccgcctgctaaaacatcccggaacaccgcccgaccgacagacttcacatcaatgccgtgatgttcgtaaaaccgtttatcttcaacggcgataaacgcatctctcacatcttccggaacctcctgaatggataccggttcgcggttttccgtataaaggctcgcgatttcatcaccgttttgatcgacgatttttgaagatgcgtgcagtattaacttcttttcatcgatgacataatggccgagaaatataatgataatgtatccgattaacgcgagaaaagcggttgccgctgcaattacagccggaataaagaatctttttttctttttcagcataagtcacctcgcctttcttaacttgtagtatgggaaatattgtttcgatttatgtcagaatgagtcgccaatagaaacttataccactcttttgatatactagcaagcaggaggtggctgatatgaaggtttatattacatacgggacagccgattttttaaagacgattgcaaagaaacaccctggtgagaatatggtgctgatgcaaggggatgaaaatgcgattttaatccatgagacaaatggagaaaccgttttccaggcgccccattcatatgaaagcatcgacagcgtcggggaaatcaaaaatccgggctacgccgtcctcaacaacatcgcagttacccaggaaggccggccgctgtttgaaaatcggtttaaaaaccgagccggcaaagtggaaaatgaacccggctttaaagccatccgcgtattaaggccgctcgaaggcgatacgtatgtcatcctgaccctgtgggaagaggaaaaagcctttcagaactggcagcagtcaaactcttatcaggaagctcataaaaaacgcggaacatcagcaggcattgatacgacgtccattttctcccgtccatcttatgtaaccgcttattacgctatagactaaaaccgccggagattctccggcttttttttgtcccgattttcagcttccttctttgcaccttccgcccgcctatgaataacctgtagcaatcctatttataaacggagtggttcaattggggatcggcgtctactcgatacatctgctttatgttgcttttatcgcagccattatcgtttttatgcttctcagaaaagatacaacctttatttcacttgccggtatttttgtgattgcgctatggacgacgcattcattctccgcttcggtcagcagcctgtttcacagcttcacgtatgccgccggggaattgctgccgacgatttttattatttgttttatcgtggcgatgagcggcattttgaccaaaacaggtattaatgaagcgatgatttctccatttgcgaagctgatgaaagggccggctgtcgcgtattgggtcatcggcggactgatgtttgccatttctctttttttctggccgtcaccaggggtggcgctgatcggcgcagtgctgcttcccgcagcgatccgggcgggtctttctccgatcgccgcagcaatggcgatgaacctgttcggccatggattcgctttatcaggtgattacgtcattcaggcggcgccgaaattgacagccgatgccgccggagttcctgtgggcgatgtcatgcaggcgagtattccgctcgttttgatcatggggataacgacgacagtcaccgctttttttctcatcatgcgggaacgaaaaaaaacgcaggcccccctctccttttacagctccggttctttggacacaagtatgtatcttccgaaaaaactcagggtcatcctggcggttttcattccgattgtttttcttgccgatattatttgcatgctcgtataccgcctgcaaggaaatgacgcgacggcactcgtcggggggactgcgatcggcatcctcctgatcattcatttcattgttcataagcagcggcatttagaaaagatcactgagtattttatcggcggttttcaattcggctttaaagtattcggccccgtcattccgatcgcggctttcttttatctcggtgacgcggggtttaaaagtattttgaacacccctctgccgcagggatctgcggggatcgtcaatgacctcgggctggcgctgtcccattcctttccgatgtccggggaattcgccggcatcgccctcaccgcagtcggtgcgattacagggcttgacggttcaggcttttccgggatatctcttgcaggctcgatggcaaaactattttccgccgcgcttcatacggacccggccgttttaacggcgctggggcagatttcagcgatctgggtcgggggcggaacattggtcccttgggcgcttatccccgctgcggctatttgtaaagttgatccgtttgagcttgccaggaaaaactttattccggtggcggccggacttgtcgtcacaacgatcgccgccatcatcattctcccttagcaaaaagattgaaatcttctgacattttctatacaatcatgggaaaagcagacgagggggcatcgctttgacattaacggcacttcaaaaaagcttatacgccgagcttgacggcctgtatgaggaaatggttgaaatcaggcgtcaccttcacatgaatcccgagctttcctttaaagagaaaaaaacaccggcgttcatcgcatcgttttatgaaaaactcggcgttcccatccggacgaatgtcggaggaaacggagtcacagcctatattgaaggcagtgaaccgggaccggctgtcgcgctcagggctgattttgacgctttgcctatacaggatgaaaaagatgcgccctatgcttcacaaatccccggcgtcatgcacgcctgcgggcacgacggccatacggcagctctgcttgcggtcggaaaagtgctttcccgcaaccgggaaaacctgaaagggtcatttgtgatgatccaccagcacgccgaagaattatctcccggcggagcaaaatcaatgattgaagacggctgcctcgaacatgtcgacgccattttcggcacgcacctttgggcgactgaacccgtcggaacggttttatgccgcccgggcgcagtgatggccgccgctgacggatttacgattaaagtcatcggaaaaggcggtcacggcgcgatccctcacgatacgaaggacgccgttttaatcggctcacaaatcgtcaccgcccttcagcatattgtgagccggcgggtaaaccccatgcacccggccgtcatctcagccggctcgttcgtcgctgaaaatccgtttaatgcgattgcggatcacgcagtcataaccggcaccgtccgctcgtttgacgaagaggtgcgcagcctgctcgaagcagaaatagaagccgtcgtcaaaggaatctgcgccatgcactccgcttcttatgaatatcgtttcaaacgcggctaccccgctgtcgtgaatcaccctgaggaagcggcgcacgcggctgctgccgcagcggaaacagacggcgtcacaaaagtcgttgaaggagagccgcagatggcgggagaagacttttcatattatctgcagcatacgaaaggcgcatttttctttacgggcgccgctttagaaaatgcggaatctatttatcctcatcatcacccgaaatttgattttaatgaaaaagcgatgctgacggccgccaaggtgcttatcggcgccgcggtgagctaccgccgctaggcataaaaaaacagccggtacattacgtaccggctgctgtaattcttaaatgaaaaacatgccttgccgtctcgcctagctgtgacagcagtttataattggccgctccgcccacggctgctccgacgaccggcaaaagctgaaacaatttcaccacgtccagataatcgcggtattcctgctgaaaaactctccaatcgacatcatgcttttttgaatcccaatgttcaataatcgagtatatgtgtttccgccgttcaccgcttgagaaagcaagctgaaaaataaacagcaaaaacaatcgttcatctctatcactcacatcaaagccgtaaatggaggcaagatcgaacaggcatttcattttaatcgacaacagcaaaggaaaatcagccattcctaaaaaaattccgccagcccccgtaccgataccctcggctgccgcgaccttctggtatgatgcgatggtttgtctggccagggcatctttttctgaaagggtcataccgtttgtatcccgattgctttttgccagatttgaacccgccattgttgcttcggtcatttttttgatgctttctgtgataacggtatgaattttttcgggaatccgctcatttattttcgcctgcattcctttagaaaaacgttcgagcatcgaatccttacgcaaaaaacgcgctttccattgcaaggcttcatgtatcactgctgatcgccggtcatctgcgtctccttctttcgctataggtttcaaaaacccgattgattacagcttgccgtattttttcaatctgcctcccatatacgaaggcataatcacaaagatcagaacggctgaagcgatagcggcataaagcgccccgctgactcccgcggcataggccgacgctgccgtgaacagcaatgcctgcacggttagcaccgatttcatcagggaaaagaaactttgcagcttcgctttctgattgaccgggtaaagctcctgtaaagaaagatgatgaaaatgcccgaacagcggcaaaagctgtatccccgtaataaagacggtaaatacggttaacgccgccgttatccacggattggtggaaacgagcataattatcagaataaaaataatcgtgagcctgacttgaatgccgagataatcatttgaacgaagaaaggcccgcgcatacatatatgagaacgttttccgctgttcaaacggaatcattctgagcaagaagtcgagatacgcccggcgttttgcctgtttcttcaggtgaggcacatcggtaaacagattggcgattctgtaaaaccgctgcttccttcttaattcatattcaatatgagcttcccattttaacgatttatgtttcgcggcagatgtgaaatacacataaagaccggccatcacaatgtagacggcggcagcgtacagataaaacgattgcaaaatgaagtataaaagcagcatattacagataaagcgtatgatcgcatccgtcattttcatgcttctgtcattcataaatgtcatccgccactccatggcctgattccatgcttttaccgccagcatctgaataaaaacggcggcatacgacgtaagtgacgctcccgggcttacagcgaaaaacagaggcatgcacacaagcgacagagcgaaaagcggaaacagctgtgacagatagctgtacttgaatgaatgcttaaagtatgtccccattttcggttcaagcggcagcaggaacacgagatccgcttcctttaacagcgtccggacgtatgagcccgtcagcacaaatgaaaagagcaccgccatcacccaaaatgacgggaaatgatcgggaatgtctttgacccatttgctgtaccagctcgccgcgccggcgataaaaaagatcagcacaatgacgagatgatcattgagcatatatttcatatacattcttgtttcctttatatgctcctcaagccgggactgccaaatactagacatattattcatggccggcgtcttcctttgtcaattcaatatacaagtcatcaagagcggcgtctctcatgccgaactgctctctcagttcttccagtgtgccgcttgcccgcacttcgccgttatgtaaaatgatgaaagcgtcacagtagcgctctgccgtagccagtatatgcgttgacatcaggacggttgatccggcttttttcgcggcgtccatccgctctaataaagcattgatcgcaagcgggtcaagcccgagaaacggctcgtcaatgatataaagcgaaggctctgcgagaaatgcgcacatgatcatgactttctgcttcatccctttggaaaagtgagcgggaaaccatttcagccttttttccattctgaattccttcaaaagcggaggaagccttttttcaagcgtttctttggaaaggccgtacgccatggccgtcagctccaaatgctctttgagcgtcagttcttcatacagcaccggtgtttcgggaatgtacgtaaattgcgaacggtagctttccttatcctccgaaaacgtcttgccgttcagctcgattgagcctttatgcgggtccattaaaccgataatatgccggatcgtcgtgcttttgcccgcgccgtttaatccgatgagcccgacgatttggttcggctcaagggtgaatgaaacattttttaaaaccgggtttctcgtataaccgccggttaagtcttttaccgatagcagagacataatttctccccttctgattcgtttttcttcatagtaccaaaaataaaggctgatttgaaacgattccctttttttctcacgtgaaaagcgtgcatagttatcgtgatctcggacatcataatgcgtgtagaaggaaacagctttaatcaactgaaaatgaggtgtttataaaagacgtctttgaacagttggatgaaaatcaacatgtcctatgcttacaatttcttcacacactgctttgatgatgttcttcaatcatgatgaaataatcaaatgaggtgtttgtcccaggaatgattaagcagacccataagtcttcattttaaaaacaaatgaggtgcttacaaaaggcatattaaattttctgtgataaagctcgtacttctgcatcaggatgaacgctcagccgttcatcctgttttttgttttggccgtttttgtggtaggatgagaatatacatatatttcttttcagggaggaaacccatctatgcacaaagcggacgattgtattttctgcaaaatcattgccggtgacattccgtcttcaaaagtatacgaaaatgaacacgtcgtggcgtttcttgatatcagccaggtcacaaaaggccacacgctcgtgattccgaaaacacatattgaaaacgtgtacgagtttacgcctgagctttctaaagaatattttgaggcggtgccgaaaatcgcgcgcgccatccgggatgaattcgagccgatcgggctgaatattctcaataacaacggtgaaaaagcgggccaatcagtgttccattttcacatgcacatcattccgcgttacggaaaaggcgacggcttcggagcggtctggaagacacatgccgaagactacacgcctgacgatcttcaggaaatcgcttcaaccgtcagaaaacggcttgcctcatcttaaggatgaggtttttttgcgtctgaacatatataaaacataaaattatatttttttatatcaaaaaaatcaaaaaattgtgataggataattgtattatttcttacactaaagcggaaaacagggagagatcgtaaacatggaacgtacaacgaatttcaatgcaggacccgcagcccttccactggatgtgctgcaaaaagcacagaaagaatttgtcgacttcaataacaccggcatgtccgtcatggaactgtcccaccggagcacggaatatgatgcggtgcatcaaaaagccaaaacccttctgaaagaactgatggatattcccgacgattatgatattttatttcttcaaggcggagcaagcctacaattctcaatgcttccgatgaactttttaacaccggagaagacggcgcacttcatcgtgacgggcgcatggtctgaaaaagccctcgctgaggcgaaactgttcggaaacacatccgtcacggcaacaagcgcagattcaaaccacaaccatataccggaagcggacctctcagggatcaaagacggcgcctacttgcatattacgtccaacaacacgattttcggaacgcaatggaaagaattcccgaactcacccatcccgctcgtagccgacatgtcaagcgacatcctcagcagaaaaattgatgtcagctcgtttgatgtcatctacggcggagcccagaaaaacctcgggccgtccggcgttacggtcgtcatcatgaaaaaatcttggcttgaaaaagaaaatacaaacgttcctaaaattttgaaatattccactcacacgaaagccgattcactgtataatacaccgcctacatttgcgatttatatgctgagcctcgtccttgaatggctggctgaaaatggcggtgtcgaagcggctgaacggcgcaaccgggaaaaggcggatgtcctgtacggcacaatcgatgcgagcggcggattttacgcgggccatgccgaaaaaaacagccgttctcacatgaatgtcacgttcactctccgcgacagcagtctgacgaaaaaattcgttgaagaagcgaaagcggctaaaatgaccggactcggcggccaccgctcagtcggaggctgcagggcgtctgtttacaacgccgtcagcctggctgattgtgaaaaactggctcagtttatgagaaagttccagcaggaaaacgaataaatttcttctaacataacggttcctttgatatactgtttgcatatcaatttttccggccatcgcaataaatgacgagcatattattggatggcgaaaaagcttagcagaggagagcttagtatgaaaacaaaagaattagtcattatggccctgtttgcggcaatcggagcggtgcttcactccattatgccgccggtattattcggaatgaaacccgatatgatgcttgtgatgatgtttatgggcattctgttatttccccgtgtgcagaacgtgctgatgatcggaattgtaacgggaatcatttccgcactcacgacatcttttccgggcggacagcttccgaatatcattgaaaaaccggtaacggcgtttctgtttctggcgctggcgcttttgataaaaaagagcgtgaaaacagcggcggctgccgtcattacgatagccggcaccttcatctccggcgtgatctttctggcgctggcccttctgattgtcggcctgccgggcggattcaccgcattggtgctcgcggtcgtccttccggcggctgcgctgaatgcgatcgccattgtcattatgtatccgattgtgcagacgatcttaagacggtccaatatgattgaaacggtgaaatagccgcatactgaaacctcttccggcacgaagaggttttttaatgtgttacagcatgttttacacgagaagttttgtgaaaaagataaggaacaatgcgagggcggttcctgctgagcagacaatggccttttggcggacgacccgcttcggcggataagaagcggcctgaccgagcagtttaaggtagtaaacggcgcccgccgcgaagacaagagccatacaagataaaacaatcatgaagacagacaaccttctccctccttttcccttaaaaaatatgctaaaataaagcaagctatgtatagaagtttattcttctgaacaaaaatgataaaagtgacaagaaaaaaacggggtgatttcaaatggctgacggacgttcccttttaaaaggccttttcgtaggcggattgatcggaggcgcggcggttttgctttcggctccttcatccggaaaagagctgcggggcaaaatcaaagcgaattgcaattcaattgaggacacaatcagacggttaaaaagagacggaatggcgcttaaggaccagcttgtccaaacagcgaaagaaagcgccgaagtcattaaagacgtaggcggagagcttcagaccagcattaaaaggtggcaggaggaaatcaagccgcaccagcaggatctccaaaaggaaatcgctgatattgaagagaaaatcagacagctggagaaaaccttacaaaactaatatcctatacaaccaaaaaaagtgcggacatattgcgttccgcactttttttgcgtgtttaaaacctttcacagcaatggattaagaatttattataaaattcttaaattttcatctttattaatctttattttattggcataatagagggaaagaaaatgtgaagcaggtgatctgtattgaatcgtgttgaaccgccttacgatctaaaagaagctttaatctatacccaaaaaatggcgcagctgtccaaagcgctgtggaaatctatcgaaaaagattggcagaattggctgaaaccgtacgaccttaatattaacgagcatcatatattatggattgcttatcagcttaaaggagcttctatttcagaaatcgccaaattcggcgttatgcacgtatcaactgcgtttaatttttcaaaaaaacttgaagaacgcggatatctgaaattttccaagcggctgaatgacaaacggaacacgtacattcagttaacagaagaaggggaaaatgtattcgaaagtcttcttgaggagtttgccccgtcgagaaacgcggtgtttaaaggttcacagccgctctaccatttattcgggaagtttccggaaattgaagaattaacctgtgtcatccgccacatttacggcgaagattttatggagatatttgagaaatcattgacaaacataaacaatgattttgaaagtgaagacggaagtctgaagaaaaaaacgggcgaatcggctgtccatgaaacggctgaagaactggaaccgatcaacagttaatcaaagtgcttcataatctcaataaattcttccatcagcgctgtataaagcccctgctcatacaaagcaaaaatcgtttcatgaacatctaatttttcgttcagctgtcccgcaaaaagcgcaaggagtttgtcgaacgtcacaaagccttgcgctttttgcgactccagctcgtcctccaattcgcggcagatccgcccgacctcttcaccttcctcttcggtcagccctttttcgatcatcatcgcataaaaagggtacttatccatatccactgttttcacaagcaattgtatgtaatattctaaccgcccgatacgctgatccattgaatccatccgtttcacttctttctatctttaatcttattttagctgataatgaatagagaagaaagcttaaaccgtacatttccatgtttcaccgctctcttctgatcttccctttccgggtttatttttttctttaaaaaaggattgattttttctcctgaagagagtaaattattttgagattgtattccatctttgtacggaaggatgactctgatgaattgctggaaaaccattaatctgatcaaagattatggtgcggttcgtttattattgactgctgtaggttttatgatcctgttttttatatgcaacttcttggcattcgggctgctgcgtccgaatatcagtttaagtgacgggcatgtatttgctttttgcgttctgctcgtcgttactttatttgtacataaagtcatacatgtcctgccgatgatctgtaaaaaaagaaaaaaggaaatgaaaatgtactttttgcggatgccgacatggaaaggcataccaaaaacaacaatgctgatttcaacgatcagcccgtttttattcattacgccggtattattttatgccgggctggcatttccgagtcacgcccattacttttatatgatttcgagcattcatgcgggttattgcctgcctgatcttctgtttgcgctgcatctggtcaaagcgcccaaatcatgtctgattgaccaggaatccgacggctttgatattttagtaaaaaaagtgccggagtcttgatgtcccgctgatttttcagcttacattctatctttttcaataaatatttggtaatgtaatatgggagcagttcagagagagggggaatctcccatcattttattctattttatcgtggctgccctgtttattctttatttcataaacaggctcacaaatacattatgccttgtcagagagattcctgaagaccggcaggataaggtattccgttttattaatgtatctattttaattttactgatctcttcgttcgtcgagatctcctttactgtgtaaacaggcaaaaaaatatggctgccggcggattaacgcggacagccatattttttttcttagtaaatccaagaagcgccgatgatgatcaataagatgaacagaacaaccaacaatgcaaaaccgcctgcaaatacttcacccatctccaaaagcacctcctacaaaacgttttatttttccaattacatcatatgcaattcacttcagaaacgattaggcgctcgggtaagaaaatggaccgctttagaaaaagcgatccggtccgcttagcaaatgtaagctgcccctacaataacaagcaaaatgaacagtactacgagcagcgcaaaaccgtttgaatatcctccgcccatggttcattacctccttttcatgatcaatatatttgtatgtattaggaaaaagtttgactagacgaatgccctttatttaaaatctttttacagaaagccacaatatgttatgatacgcatatgcaatttaatttggatgattaggagtgtttaaaggaatgaagaaaatcgcgatagcagctattacggcaacgagcgtcctcgctctcagcgcatgcagcagcggcgacaacgacgtgattgccaagacggatgccggcaatgtgacaaaaggcgagctctacacgaacatgaaaaaaaccgcgggcgcaagtgtgctgacacagctcgtacaagaaaaagtattagccaaaaaatacaaagtatcggataaagaaattgataacaagctgaaagagtacaaaactcagctcggcgaccagtacagcgctcttaaacagcagtacggcgaagattacctgaaagatcaggtaaaatacgaactgcttgcccaaaaagcggcgaaagacaacatcaaagtgactgactccgacacgaaagaatattacgacggcttaaaaggtaaaatccgtgcgagccacatccttgtcgctgataaaaagacagctgacgaagtggagaaaaagctgaaaaaaggtgagaagtttgaaacgcttgcgaaagaatactcaactgacagctcaaaagacaacggcggcgatcttggctggttcgataaaaaatcaatggatgaaacattcagcaaagctgcattcggcttgaaagtcggacaagtcagcgatccggtcaaaacaaaattcggttatcatatcatcaaaaagacggaagaacgcggcaaatatgatgacatgaaaaaagaactgaaagaagaagttcttaaacagaagctaaacgacaactcagctgtacaggcagcgattcaaaaagtcatgaagaaagctgacgtaaaagttgaagacaaagacttaaaagacacgtttaacacttcagcttcaacatcttctgaatctaaataaaaaaaactgtgcgggctctcggcgagccgcacagtttttttatgcgatggaatgattggagttctcttctgcatccccgttttcattttcgggcgccgccatacggcgctcgcgttcctgctccatccgttcaatatacactcttccttctttttcaataaacgactggtcaagcttttcctcttctttagctgtcgtgaaaagcttataagcgctgaaaataatcccgataatgcaaaggtatacccaccaaggaaaaaatagcacgttgttttcctccctttttcacccagagtctttattctaagctatgcttgataaagacaagttatgagagctgaacgtaaaaaagaccgatcgcagaggatcggtcttttttatcttattgatggaaagtcggcttgtagaaagagcggttttcaagcgcaaatacacgctctgtgtactcgcccggtttcacccgttccagtgctctgtccatcatgatcatttttgcatccagattgtcaatgtagtgcagaatttccgcttctttcaccatcggcggtttcgggcttccccactccgcttttccgtgatggcttaaaatcaaatgcttcagaatcagcacttcttcagcgtcaatctgaagctcttcggctgcttttgaaagctctgtcaccatgattgaaatgtgtccgagcagattcccttccacggtgtacgtcgtggagacagggcctgaaagctcttttactttgccgagatcatgcaaaatgactcccgcatacagcaaatcccggtcaagtgacggatacagatcggcaatcgcttttgccaagttcagcatggacacgacgtgatacgcgagccctgagacgaactcatggtggtttttagccgccgccgggtaatccataaaatcagcggcatattttttgatcaaatgtcttgtgatccgctggatgtttggatttttcatttcaaaaatatattgcgtgacggtctccatcatttcatcttttggaatcggcgccgtttccagaaaatcatcaatgctgacattttcattctcggcggccggccggatatttctcagtttaagctggtttcgaccgcgataatgatggacatctccgattaccttcacgatcgtctgcgccgcgtacgtgacttcatcagtcggcttggcatcccacagcttcgcttcgatatccccggattggtcctgcagcattaatgtcagaaacggttttccgttgctagcgattcctttagtcgaagatttaatcagaaagtattgatcgacctgctcgccgacctcgtgcagcataataccttttgccattctattaaaagctccctccatatcttacataataccagtatagcacatacctcttttttgaaaataaactcttttatgacaggagccgcatgacttgcccgctgtgaaatgaccggctgacatgctcatggcaggtgaaataaagaatctgacggccgccttctgaaagctgattcagcacatcaaacagccgctgcagccgctccctgtcaaaatgaacaaaactgtcatcaagtaaaaacggaagtgataccgcagattcccgttctgatgcaagggcaaaacggatcgccgcataaagctgctcgcatgccgcctgtgacagctcgcttgcagaaaaaaccgtgccgtctttctgcatgaccataatggagtcatcagcttcagagaaatacaatttctgatagcgtccgtccgtaagcggtccgtacaatgcacctgcggtttccaacagacggggaagcgtgacttttttatgccgctccattttttctctgatgatgtgtctgaccgtctgcaatgcggcccactctttagctgtttttttaacgcgttctttctgcatttctgtctgctgttttaaatcggataccagccccgaggactccagctgttcttgtttcaccgttaataaagcgatctgctcacggagatgggcgattttttcctcaagtgtttctttctcttgttctttctgaacggctgtatgttcaagttcgggcactgtgcggctcatgtacggctccagctgtttgccgcccttgccggataagtgcgttttgatttcgcacagcttcctctctgtttcccggcggctttcattcagcctgccaagttcacaaaagtgttcacggttttttgcccctgcctctgtaaaaagctgtttgacctgctgttcgtagtaatgaacttcttcgtttaattcacggatttgctcttgggtatgcagcaggtctgtttcgagcgcctgttttcgttttgcatcttcacgggcccgttctgcctgctgcagcaaaaagtgcagcctttcttttacggacagctcccggccgtctgaaggactcagctttttgacccgttcctcaaatgctcgttgcagtttttgcagccgccccgcttcaatggtcagctcatgcttggtaaggatttcttttttgacatctttcatcacatgatatgcgtcgaggagatgggacgggctgcccgaaaaccccagttccttcataaaatgttccgtctttttttcagagggcgccatttcggcctcccattcttcatattggcggatgactctttcatatgccgcttctttctgttcaagcaccgcttgatccgcaatcagctgctgccgatgctggccgtcacgccatagctcttcctgcagaagatcagcctcttcttttgagatcaggggcttctgctttttgtgaccgggccggcttctttcagacggcagcgccttttgcatgccagtcagcacgtacagcatcagagcgccggtaaaaagggcggcgggcagccattcctttaacataacgaaaatcgcaatgaacagaatgcccgtaccgagaaagagctttttttgtttggcgcgctgtttttccagctgccggagatgagcctgccattcgtttccttcagtatcagccgtttgtttatatgcttgtaaggcggcttctttttcttttctgacagcgggttccaagacgttttctgccgtcacggcatgttttcgttcagcgtcttccagctccagccgcgcttgttcaaatagagagtcgagctgtgtttttctttctctggcctgtccggcgctctgaacggcttcttgcagctgccattcatattcataatcggtgttcagcgaaagaatgtcgtcttcctcatgtctgccgagctgctgtaatcctgaagaaacacgggctgatgtctgccgcatctgtgattggatggcggcaagctgttcgccgcgtgattcgtacatatgctgctcgccggaaagctcctgcagctgccgctctttttgtaacatgtcctcatttggagagagcagatcagcctgccgtttgatttcagccgcttttgcccgaagcccctcaagccgggccgctttcggatggagatgcgattcgtatttttccagctgatgcattccgtccttcgggaattgctccgctgcttccgggtaagaagaaagttcgctttccagcgctgtttttttgtccgcaagcggctttgcttctatcgccgcttttactgttttgatttcttcagttatatctttcaattgcgctttggcatcctgcaaacggccgccggcgctttttttctcttccaggaggctgtgatagcccgcttccgcagtttccgcctgtttgagcttggcgctgagccgctttaatgtatccaattcctgatttaagcgggggttccgcccgttcggcttatacattctttcaagttctttcgccagtctgccgtcaagcttcgccgccgcttcagacccgaataagctggaaaacaggagaaactccccgattttgtctcggttaaaggcttgaatctcctgcagtccgaatacatcaaacgaatagatcgcttcgtacagcgcacgatctgtatcggaaagcagctgtttgagccattttccgtccttaatttcgcctgaagccgtgtacactctgactttttcggcagccccttttgtccgttcgattttgacagcaccgtaatcgtcatgattcagttccacaacgccgccgtaaaccccgccggttttcggttcgtatttttttgatttcggaaaaccgaacaggacgcttttgataaaggacatcaatgtcgttttgcccgcttcatttaatccgtagatgacttgtacgggggaatccgacagctgaaagcttcgattggaaaattttccatactggtaaatatagagcgccgttattttcatcgctgaagctccttcagctgtcgctttaaaacggcttgggcctgccgcttaatgtccagcacctcttcatctgtaaatgaagtcatctgccgccgatatacgggatgacgctcgagcgcttcaaacccaccactcatgtccgcgcattgttctatgtcctgaagcagccctttaaaaaacggatcgggcgggacggtgtctgtttcatccgtccgatcctcaatcgcaagcggccagacgaaacattcctcttcggcctcttcctcctgtaaagcggaaaggagctcctctgcgatccctgcgggcgcctccgtccaaaagcggggcgccgcaccgcggagcaccagcctgatacatgccgggcggcccgccgcacgcaagcctgagaacgaatccgtggcggctttcataagtgaggtcatatgttcagctccggaaatatcaaggtcaatttcctcccataacacatcgtgcgcttctttgaattcccaagacatctcaccgtttgccgcccggacgagataatatcccttagggccggtttcttttagatggcgggcttgaatatttccggggtaaatggcggcgggatgctgagcggaaagaacctgccgtttatgaatgtgtccgagcgcccagtaatccatgccgctcttttcaaggtcttctttcgtaaacgggcagtacggatcatgtccttccgctcctgataacgtgccgtggagcatgccgatatgataaggcgcgccggtcattttccggtaccgggcggcctgattggccgttacgcttctttcctgatagctgcatccgtatatgcttgccgcaagctctccgtttttaaagaaagatttttcctccggtgtatccgaggtgaatatatgtacattttcaggccattcaatcggtgtccactcaccgcccaaatgatcatggttgccgaatatgacgaacacttggatatccgcttcctgcaatctggtaaactgttttctcaaaaacagctgggcttttaaacttctgttggcttcgtcaaacagatcccccgaaagcagcacgaaatcgacccgctccccgagcgccccgtccgtaagacggcggacgctgtgaaatgtgctttctttaatacgcgcatataccggttcaggcagatgcgaaatgccgtaaaacgggctgtccagatgcaggtcagcggcatgaataaacgtcagatcagccatctcgccctcccctttctgtagattgaattaccctttattttagcatcgttttcatgcgaatgcacgttctggatcataaaaaaacagcccggctgtctcgggctgtttggacttattttttggagatgcgcagcgcttgtttgatcgctttgaatccgccggcgtttccgtaaatcaaaacgccgcctttgtaaattttcgcgccgaccgttgcaaagatcacgattgtgaccagagtcagggcgattccggccgccgcctgccaaaacgggatatcgagcatcccgacgcgtaaaaacataatcatcggcgtgaaaaacggaatgtaagatgtaacggtaataaagcccgcatcaggattgccgaggccgaacatggcgatcataaaacctgccacgattaaaaaaaccattggctgaatcgtctgctgcacatcctctatccggctgacaacactgccgagaaacgcggcaagcgtcgcgtaaagaaaatagccgagcagatagaaaatgacggcatagacaatcgtcgagacgggaacatccgtaaaattgagaaatgcactgatcggcgacgactcatcattttgagggttcagcttcagtgagagaaaacccgccgcaagcagcaccgcaaactgtgtgatcccgacaagcgcgataccgaacagtttggcaaacatctgctgaatcggcggcatgcttgaaattaaaatttccatgacccgtgacgatttttccgtcgcaacttccatcgcaatcatgcttgcgtacatgatgactgaaaagtagatgacaaacagcatgatgtatacaagccccatcacctgaccgagctcttcctcagatttcgcccctttttccagcgcgtctttgctgacttcaggcggagtgtagaggctgctgactttttctgccgaaatgccgagcttggcggtttcaacagcggtctttgtctgtgttaaagcctgcttgagaagtttatacgctgattcatcagaaatggtcagcgccttgtaggctcctgttatcgttcctttttgatcttgtctgatgataaaaagcccgtcccattcaccatctttgacacgctttacggcatctttttcggactccttcgtctgcatcgcctgcaaatcattgtctgtatccgccgctttaagctgttttgcaaatgccgggtacagcccgcccgtttcatcaatcaccgcgatttgctgcttgccgtcatccgattggaacactgaaatgatcgattgcaggttggtcaccgctaaaactaataaaacggtaatggcggtcgaaataatgaatgactttgtcgtaattttgtttttatatgtatgaaacagcataatccaaaatttattcataaacggcccccaccttttctataaaaatatcatgcagtgacggctcttccaattcaaacttccgtataaaacctttcccttgcagcgcctgaaaaatatcctgagacaccggttcattcgcgacctgcagcctgatcccgtcatttgtttccttccatttcacgacaccttcatgcgtttttaaaaagctgagatcgtcatctgaatgaacggtgatattttttttgccgaaagaccgcttaatgtctttcagattgccttgaacgacaggttttcccttttggagaatgcatagattctcgcaaagctcttccacatgctccattcggtggctagaaaaaacgatggaaacgccgctgttttttaaagaaataacggcttctttcagcagctcgacattcaccggatcaaggccgctgaaaggttcatcgagaatcagcagctcaggcttatgcaggacagcggaaatgaactggattttctgctggtttccttttgacagctcttcgactttcttattcttgtaatctgtaatgccgaaccgctcaagccatgtgatgagctctttttccgcatctttttttctcattccttttaatctcgcaagatagacaagctggtcactcactctcactttcgggtacagcccccgctcttccgggagatagccgattttttcgctgatagaataattgaccggctgccctttccatctgatatttccgtcagtcaggcttaaaagacccaaaatcatccgaaaggtcgtcgtttttcccgcgccgtttgcgccgagcagcccgaacatctccctttcaggtatttgcaggttcaaattatcaacagcggtaaagctgccgaatgttttcgtcacgtgttcaattgtaagcacgaatccaactccttccgctacccattatatactaataatgggtaaaaattaatggaggattttaaattctttatcagaatatcattctataaaggaggtgacgtgatgggacaatttgtattgaccgcattccacgcatcgggggaaacactgctgaatgaacggatcgaagcagaaaatgaggcggaggcgaaagccgccggagaggctttattaaaagaaaaaaagcttgagaacaatactcatcgcttggtgaatgaagccggaaagctgattttatttcacagataacagaagctttccggcttctgttttttaccggttaaactgcggcgtccgcttttctaaaaaggcgcggatgccctctttatgatcatccgtttttctcatattttcctgggcctttcgttcaagagacaaaacatcttttaaccggctgatatggaggctttgataaatagccttcgtttcaatcattgctgacagcggcgtgtgtaacaatcggtcgatatacggttttgccccggccgcagggtcaccgctgaacagcccgtcggcaagcttgagccgcaccgctttttctgccggcaatttttcaccgctccagatcagctttttcgcttcgatctcaccgacgcgtctcattaataagtaatggcctcccccgtcgggaaccagacctatgccgatgaaattcatcgcgaggcgggcgttttcttctgcgagcaccacatcggcgcacagcgcaaaactcagcccgagccccgccgcggccccgtggatggcggctatcacaatttttttcatatcatagagggtcagtgtaatggattcgatcattttcatgagccgttcatattctcctgaatcatgttccgacgtcatcatctgaatatcaccgcctgcggaaaaccctctgccttcccccctcaaaaggacgataagcgcctcactgtcagctgccatgacgcatgcattctccaattcccgcagcatttgttcattcagcgcattgtaactgtcaggccggttcagcactatctctgcgatctttcccttttcttcatatcgaatatactgcatgtttacatcccccttgtatccgcttacatattttgttcaaataatatattccttccgccgaagcgaaactcctttatttttcaaggtcaacagataccgaaaaatgcatatcatttgaaactgaacatacatttttatatagtgaaattgacacacaagacaaaaaggggggaacgccgataatgaaatatgtgatactcagctttttactgagcttttttatggtgctgtttcccccttcggatgtcgcccttccttcccaattggtgacagaaacagacagccacgttcaaatttcggtttacccgcaggagacggactcggcaaaaacgccggctcataccaaaaccgctccgtacggcctgtctaaaggatacgacgtattatcccggatggtcaccctgctgtctgtcaaacctcttgatcaatttattgattccactctggaaaggacgtgcgccattccgatacaataccagtcaaattacctccggcatcagacaatctctcaatgccagtctgtatttacggtttaaaaacagtatattccggagggattttttatgaatattaaagaaaacgatctgcccggcatcgggaaaaaattcgaaatcgaaacgagaaaccatgaaaaaatgacgatcattattcatgatgacggcaggcgggaaatttacagatttgatgaccgcgaccctgatgagcttctggcaagcatttcacttgatgatgcggaagcaaggcagattgccgcgattatcggcgggatggtgtacaaaccgcaggcgcttgaatcaattgaaatggcgttcagcgatctgatcatcgaatggttcaaagttgaaaaaggagcaaaagcggccgggcggacgctcggcgaactggatgtgcgccagaactatgatgtgacggtgatcgccatcattaagcataaccagaaaaagtttttgaacccgggcgctgattcgcttcttgaagcaaacgatacactcgttctctcaggcgaaagaaagcatctgaagaaactgatccaagacttcctctccagagacggagtgtgatctgtttatggaccatctcgtatttgaagtcggtacggcgctagttcttgtggccattgcgagtgtcatcgccaataaaattaaattttcgatcattcccttcctgatcattttagggatgcttgtcgggccgcacgccccccaagcgggcatcattgacctgacgtttatcgaaagccgggaagtgattgaattttttggacggatgggcgtcctgttcctcctcttttacctcggacttgaattctcggtcggaaaattagtgaaatccggccgctccatcgccgccgggggaacgatttatattctgattaatttcagtttaggactgatatacggctttatcacgggcttttcctttttggaagtgcttgtattggccggtgtcatcacgatatcatcaagcgccattgtcgcaaaggtgcttgtcgacttaaaacgcacggccaatccggaaacggagctgattctcggcatcattatgtttgaggatatctttctggcggtttacctatccgtcgtttccggacttgtacttggagacgcgacgtctgtcgggggcgcgctgctgtcaatcgtgatcgctttcggatacatgctgctgtttttcatcgccgcgagaaaattgccgcctcttctgaacaaactgcttgatatccgttcaaacgaggtatttgtcattgtcattttcgccgcgctctttttcatcgccggcttttccgaaacgattcatgtcgctgaagcgatcggcgcgctcttgctcgggctcgtgttttcggagacggcccattctgacaggattgaacaccttgtcgtgccgttccgtgactttttcggagccatgtttttcttcagtttcggtctgagcattgacccgttttcactgggagaagcggtatggctcgccctcggcgccgttctgctgacgattgccggaaactttatcgccggcatgattgccgggcgccgggcggggctttctcataaagcatcgtctaacatcgggctgaccatcgtctcccgcggcgaattctccatcatcgtcgcaaatctcggcatcgccggcggcctgtccgcttcactcaagccgttcgccgccttatatgtgttgatactggctattctcggccctttgctcacgaaagaatcgaagcggatatatctcctgttgaacagtgttttcaaatggaaaaagcctgaaaagaagctgcagaaatcataaaaaaactgacctctttctaaggggtcagttttttcgcgcgggaagaaattgctgaaaagctgtttttttgttaatggagaaatgctctcttcccagaatcgtattgatgattttttggtttctgtaaacagacagcttcaaattcgtagcgcccgttccgtgggcatgatcaagattcgttaacgtgaaaaaatgatgccgcctatcgtccttaaacacaagacgggaatctgccgtcactttaaaccgtttctcatcctcccattcgatatcgggagaaattgccgtaaaccattccggaatatgaggtttaaagccggtcgccaaaattactttttctgaatcggccgtaaagctttcatccatctgccattgatgaaagctcagtacacagcgcccgttttgcttttcaattttttcaagctccgccatcggctgaatatatacatcaggcgaacctccgctgatcgacctgtgatacagggcgtcataaatggcggcaagtgtgtcagaatcaatgccgtgacgcagtccgtccagctccggcagtgtgttcagccgttcttgaaaaggcaggcggttaaaatattccacataatcgggtgtaaacatttcctgcccgagcttggcggtttctaattctcgaaatccggcggaacgtgtcacccattgcagccggcagcggcggtattgttcatcttgcaataaatcagaaaaaatctccgctgcgctctgtccggaaccgactactgtgattgattcggcgccggcgagctcatctttccgaaacaaatattccgtgctgaccatcgtgtcctgacgcgcttcgtcatcaatctctgcgggaataagcggctcagaacccgttcccataacgaaatgcttcgtttgatagacactgatgctgccgtcctcgatgttcttaacgctgacgtcataatgcccgccggcatttttcacgtcaatcacctctgagccgaaacggcatgatttgatttctgaagctgcccagcttaaatagtcattaaactcacgtcttggaatatcaaattcattaaacgtgtaaaaccggtacagccggtcatgctcatggagaaaatttaaaaacgtgtagcggcttttcggatcagcgagcgtgacaagatccgccagaaacgccacctgtaaatccgttcctttaattaacaggcccggatgccacgcaaattctttctttttatcgaaaaaaagagcgcttgtttcgggtatatcctctaacaatgcggcaaggcctaaattaaacggcccgattcccgctcctatgacatcatacatattgtacacctcttgcaaatagcagtctgaatggtcttttcccgttttgactgacggataaacataaaaaaacggcacgctgattccgtgccgtttttttattataatgcagatttgacaaacatctcatctaagtattttattttctcttctgtataatgctcgaatcggtcattatatgatttcgggtctttcggattggcgaagtgcgtgatttttccggtttccggatgaatgaatttgcttgccgcgccgcagccgataccgataatcgtctgcacctcttccataatcataatgttgtagatgctttcctgacccgggaaggagtagccgacattttcaaggttcccgagaatatttttctgccggtacaagtagtacggcgtatagccgtgctcttttgtccagcgcacggcgtcatccatcatccgggacacttcctgcctgtcggcaaccttatacttatgcttgtttctcgtcatttctgacgcccgtttaaaagaaagcgtatgaacggtcaaagattcaggcatcagcttttccgtttcatcaagactgtgcctgaactctgccgtcccttctcccggcaggccgataatcaagtccatgttgatgttattcatgccgtgtttgcgggaaagatggtatttttcgatggtttcttcaactgtatggtgtctgccgatggccttaagcgtttcgttttcataagattgcggattgatgctgattctgtcaatcttatacttatttaaaacggcaagcttttcctccgtaatcgtgtcgggtcgtcccgcttcaacggtaatctccctgatattctctacattcgggaaagaacggaccatttcttcatataaaaggtccatttcctcagccgtaatgcttgtcggcgtaccgccgccgaaataaatggtcgtcactttgatatcatgctgtttcagccattctccgattttctgcatttcatagtgaagcccccataaaaaggagccgactctgcctgcctgtccttggatggcgtaagccggaaacgtgcagtaggcgcatttcgtcgggcagaacgggatgccgatatatatgctgacttcatctttgacccggtacagatcgggaaccgcggcgagctggcggtcgacaatctcctgcatcagattgattttttcatcatgtatcagataatcttttttcagatcggcgtgcgcttcttcttttgtcaggccgctttgcagctttttatgaaggagtttagtaggcctgatgccggttaagattccccatttttgtgtcatgcccgtatgtgattggagaagatttaagtatacgtacgacagcgtatttttcacctgtttaaatacttctttttcgctccagccggcaagaagcggtttcgtgtgatgctccttttcaccggttcctttgatttctcccgatactgacacgctgtctgcatcttgagaaatggcaagtgaaatgacgagatcagaaggttcctccgtttcgccgtacgcaagaacacactcttcaaaaaataaattcgcgatattctgcagcggacgatgcagcctgtcatccgttatgccgtctatttttatttgcaatgtgatcaccttatttttcagattcaaaactttctttagtgtacagaaagaacaggctaaaatcaatccgcgaaaaagccgcagacggcgtttcgtgtctgcggctcttcattatgaccgtttcatgtggaacttatcgagaaagcctttgcggtgctgcatgcggaagtattccttaatcatataggcgactccctgttcatcatttgaccttgtcacccagtccgcttttctttttaattcattggaggagttccccatcgcgacaccgaggccggccagctcaatcattggcagatcatcttcctgatggccgatggcgacaacctcttccattgaaagcccaagttcagcggcgaccatcgaaagtccgctttcttttgacacccctttaggcacgatgttcagtttttcctcattgacgcggatcacgtccacggccgggaatgctttccctatcgtatccgttatgtcagcctgcaatccgttttcagcatgcacctcaatgacgggcgccgaaaccggctcatcaagaagcagatcacttaatgattcgacaaactgcaccgggtaaaaaatcgggtcagacggatgaatgatcgttttcccaaccagattggagttcactttcttcttgtttccgatcgaatatttttcgtgaagaagccggatattgcattgatagctttcaagcacctgaacaatattaaacgtatgatcttctgatattttctttacaaaaaacggctcatctattttttcggaaatgtaggcgccgctgtgggtaaccaattttgcattcagctttaatattttcgctactttttgagcggagcgaaagtggcggtttgtgaccagtgtgacgtaaattccctttttcttgacgtattcgatggcatcctttgtcgtctgatgcagtttgccgttggagcgaagaagcgctccgtctatatttaacgccagcatttgttttgacacagagaagtccccctccttgatgactgtacttgtcattaggatatgaccctgtctctttgtttagaacaaccttttccgagcagcaaaaaagcctgccgtcagcagactttgaactgtcgttttgttgggatacgatcgatttgctgccttctccccaatgtgtacttctatttaagaaatctatcaggaaccccttatttgaccgttgatgcgctcgtttcacttactctctgttgctaccccttaacatatcaggcagtatcggcgaccgtatccttggatcatcctgtaagtgtaggcgctttcaaggttattatcacacttttattgtcaaaagacaagggtttttttaactaaaaaaaccagaagaaatatctatgctgaatgtacgataaagctcaaaaggaacagaaaccgccatcacaaagccttcagcaagcagcattccttgattttcagttgaataaaaaaacccctccatatccgggatggaggggtctggagcttattgcgggtttccgtaaagctcttcaagaggtttcatgataattttgtttaactcgccgatcagcatgctcatgcgctgttccgcttccatcagctgagaaatcaaatcatgctgctgtacgagagcaaccgttttttgcgcctgctctacctcttcctgagtgatttcttcacctgacatctgtttttgctgcagctgcagctgtacgttgcggaaattatcaaacatgcgttttgcggattcatctgcgtttacctgatcataaagccctctcagacggctgtattcatcactgtttcgcaaagctttttcaagatcataagccgcatcataaaaattaactgccatagtaaccgctcctttcttccttacagacataccactccactataacagactgcggagcgactttcatcctcggcgggtgtttcccttagaaaagaatgacaaacaaagcctgaattgctccaataactccgccgagcagaccgcctaaatacgtaatcatcttaaattctctcttggaaatcgacagcaccatttcctccagccgttcaaccggaaactgatcgacctgctctttgaccacttcctcaagccgcaggcgtttcagcacatcctccaagtgagcggcaataccgccgagcgctgcatcaagcagcttcggcgcatacgttcccgtaatctctctttcataacgggagatgatctcaccgagccggctttcaaaaaagggtgcggtttgaagtgcggccagaccccgttttttcaggctgaacagcagatctttcgcattccacttttcatcggcctcataaagtgtataggatttgagcttgccccattcttgagaaagcagatcagccagaagctttttcgtttcctcattgcgcaaaaactttaacagctcaggcagcacgcgttccgccagacttgaattgccgaggaacatctgcaccatgctgccgagcatccccctggcattcaaaaagtcgtcaatcatattgccgagtctgtcttttccttcttcactttcaaaatagtcaatgctccgcttcaggatataatcagcggccagcgggactttttcatccagctttttctgcagctcatcagggagccagtcttttatggcgcgatgctcatatttcgcgtacagttccgaaagcttttcatctgtaaaacggtcaatccatgcatctgttttttcctgcggattccggatgcctgcagcggccaaggcttcctgcaccgtcatctcggacgcggccattttttgcgtgaattgttcggcgaatccaagcgcctggtttttaacggtatctgacaaaagccgcttttttatgccttccggagttaacaggtggttcgtcaccatgagccccatctgttttgccaattcgtcccgtcttttcgggatcagacccggagtaaacggaatccgtttcccgaagaggtaatacgggcggtacggacgaaataacatctgaatggcaagatgattcgtcaccgcgccgatcgcggctccgatcacaatcataaatagaaacgttcctgctatgcccattccttttcttctgcctccatcttatgttctttttttctagatgatatatctattcgtattatagaggctggcgtgaatgcgggcaaatgaagaacctgaattgttgtttgtcaggaataaggcaagatgctgtttcgtactctttacagtagatcatctttttatgctgcgcttggcatgtttattggatggaagggccgttccatcagcggctttttgaataaagggggagtaacaacatgacaacactcggttttatgtccgtatcccgccggcacgaagaagacttcgccggtgaattggctgaaagggcgccagagtataatgtgcgctttgcccgctttacaccgtttgatatctctccggattctttacgagtgaaagcgctcgtgtatcatccgaaaagcggaaaatggaacgaaacagaaattgatattcctgaatatatttacgatcgctgtttttacggaaaatccgccgaggctcaaaaagccaaaccgatcgtcgaatggctgaaaaaatatccgaaaacggaatttatcggccgcgggcttcctgataaatggacggtcacgaatgcgctccagcagcatcatctgatcagtccctatattcctgaaacggccgaagtcagccgctatgaagaggtgcaatcatacttagcgaaggaaaaagcatgtatacttaagcccgctttcggcgcgggaggaagaggcatcatcctccttaaaacaggcaaaaaatcaatttcagccacttactatatcggaaaaaataaacaaacaaaaacgttttcaaaccacgtatcttttaagtcgtggtgcaaaaaagtgctgcagcaccgctatttgcttcaagcctacttaaatattcaggataaagaacagcacccgtgcgacatccgcattttcatgcgcaaaaatgagtcaggagcttgggaaacggtcggaaaagcggtcagaaggggttatcagaacggtcttttatctcatttgccgggaagatccgaaccgattaaatttgacacgtggtttgaagacattccgaaaaagcagcaggccgtattattggatgatgtcttttcgatcacccagtccgtcccttatttccttgatgagcagttcggcccgctgtttgagctgggtctcgatatttgttatgccaaagacgggcgcatctggcttttggatgtcaattcaaagcccggacgaaacgccattttaagcgtggctcccgagtcgaaagaggatttgtataccagtccgctgaaacgcttcagagatcttcaggcacaggaaagcaggaaaggagcacttccgcgtgaatcataaagggatgattgtcggcatcgataaaaaaagcaaaaacacgctgtatctccctttttccatgaaacgggaagggatgttatccgctgccttcgggaccaaggttgtcaaatgccgtgtggccttttctcaatcacttgaaaaaagcgcgctcctttctgaagatttgtttgaggagctgatgataccgcataaaagccgggctgattttctcattcacggccagacggtgcacatcggaccgctgatcggcgttttcacagccggtttcacctcatcaacgtcgcgcccgttaagagaccgcacatccttcttttccaagctgctctccctgcatgagcaggcgaacggatattgtttcgttttcggggctcatcagatcaattgggaagagggcaccgtccaagcgctgatttataaggacaacagctggaaacgggcgcacgtcccgcttccgaatgtcgtatatgacaggctcccgagccgaaaaacggaagaagttccgcttttacagcagacaaaacaaaggctgatgaatgactatcagattccttggtttaatccgcaattctttaataaatgggacattcataagcttctggaaaagaacagcctcaccgcttcgctcctgcccaaatcggtcctccatccgaatgcagaagcgatagagacgttatgcggcacgtttaacaccgtatatatcaaacctgcggacggcgctctcggaacgggaatttacaagctggaaaaaacagatgccggcttctctgtcaaacacacaaatgaggaaagaacggtgttgacggcaaactattcagacgcggcatccttcatgaaagcatttgaagaaaacaacgacccgtccgcttttttaatacagcaagggattgatctgatctgtctggatgggcgtcccgtcgatttcagggtgcatacgaataaaaatgccgagggaaaatggacagtgacggccatcgcagcaaaaatttccggtaaaaacagcattacgacacatctggcaaacggcggtgaagtcagaacgttagctgaattatacggcgatccgaaagagagagtcggcatgatccggaagctttcgaaagccgccttggcggtcagccgtgtgttaaatgagcatatagaaggttttatcggtgaaatcggctttgacctcggcgtcgatgacacagggaaagtttggatgttcgaggccaattcccgccccggacgcagcattttctctcatccgaagctgcgatctgtcgattacctgacaaaacggagaaattttgaatatgcgtcatatttatcagaacggtccattaccgccccggaaaaactttggcggtgaggccgtctttttttcgtttacccgggacaggcacagaactataagctacaatgaacaggatcaacatttcccgataaggagcgtgaacgtcatgatttcgcacttcagctggaaaccgttattcaaaaaagagaaactgcccggatggcggatttcgttttactggcagggtactcattacgaagggatttaccataagtccggagacattgaatggggacatacacatccggggaaagaagagccggctcttgtaaaagagctgcatgaattaatgctttatcacatctatgactgaaagttcaagctcagccgacaaaggctgggcttttctttttcttccgctatttaccacaccgttttccgaatgagatgccgtttgattcaccataatacgtagtacaaagcggcaaacagcattgggtgaagccgagctggcaatggttttcattccggaaaccatcagctggtgcaattccagcaaacccaaccatactaatttataaaggagatcatacaaatggctaacaacaactcttcaaaccaactattagtacctggcgctgctcaagcaatcgaccaaatgaaatacgaaattgcttctgagttcggcgtaaaccttggcggagaaacaacttctcgtgcaaacggttctgtcggaggagaaatcactaaacgtttagtatctttcgcgcagcagcacatgggcggacaaggcatacaataactcaataaatggcttgcagaaggcgcgggataccgcgtcttctttttatgccgtcacccttttttcctattccacataccctaggaaaaaaggagggaaaacatgtcattcattgcctcagtcaattgggagctgtttcagttcgtaactgtttctttggtcaatgaatatgttgcccaccatttcccctttattcacaggtattcttttccccgctgctttgaatgatataatgagcggcgaggaggttttttacatgaaaatcgctttactcggagcaacgggaagagtcggacaggcttttataaaagaagcgcagaaacacggacacagtgacatattcgctcttgtcagatcagctgaaacagcccttcccattcctgaaaaacatatcataacagggaatgcgagacggcgggaggatgtcgaccgattgatctccaaagcggacacagtcgtgagctgtctcggcacggatggcggcgataccctttcagccgctgtgatccatataatagacagcatgaaacggcatcatgttcatcgtctgattacgatcggcaccgccggtatccttcaatcacggctcatgcctgacaaataccgttttgaatcgccggaatcaaaacgaaaatcagcaagagccgcaaaggaacacgcccgcgtatacgagatgcttctgggagaggatgttgactggacgatcatctgccccacctaccttcctgacggagatgcttccggcgtttaccggttcgaacaggatatcctgcctgaaggcggttcgcgaatcaccgtcggagacacggcgcattttctgtaccgtgagctgttgaatccgcagtttgtcagaaaacgggtgggactggcttactaatgaaaaaagggcgaatctttagattcaccctttccggttacaccgcggactgcgccgttcctttctgtaattcatacatttgatggtactgccccttttgcgccattaattcgtcatggcttcccttttcaatgatgcgccccttttccagcacgagaatctggtctgcgtgtctgatcgtggaaagccgatgggcgataataaatgttgtgcgcccttcttgaaccacttgcagcgctttttgaatgattgcttctgtttcggtgtcaatgtgcgccgtcgcctcatccaaaattaaaatggccggatcgaacgcgagcgcccttgcaaaagaaatcagctgacgctgccctgaggacagtgtgccgcctttttccgtgacgggctccatgatgcccttcggcagggattgcagaaggctttcggcgccgacttggcgaagcgcttcttcagcttgctcgggagaaatacgctgatcatcaagggtgacattggagccgatcgtgcccgagaaaagatacgggtcttgcagcacaatgcccatatgcgacctcagctcctgtctcgacatgccgtaaatgcttttgccgtccagcagtatatcgcctttttgggcatcgtaaaaacggaacagaagattaaggatggagcttttgccggatcccgtatggccgacgagggcgaccgtctcacctttttcagctgtaaagctgatatgtttcagcacctcttctccctttcgataaccaaaagaaacatcgcggaattccacagtcccttccgcctttttgtgtgcgggagcgcctgtttcttccgtttcctcttcctgtaaaagttcaaataccctgcccgcagaaacacgagccaattcaagcttcgaaaattggttgacaatccctgtaacaggctgaaacaaacggtttaaataatcaacaaacgcatataacacgccgatcgaaacaaatcctgccgcactcagactagcgcctccgaaataccagatcaatccgacaaacgcaagattgcgaagaacattgacaagactgtgggacatgagggaatttaaggacagcattttgttcttgaagcggaaatgagcttcatttaattcttcaaattccttcatcgtttccttctcacggcggaacgcctgaataatcggcataccttgaatggactcgttcattttcgcattgatgtcactgttaattgaacgaattttttggttgaagacggatgcgtatttacggtacacaaccgaccagattattaagatcggaataatcagaaggcaaacggcggccagcctgacatcaagcataaacagcgccgtaaaaatgccgagcatgtagacgccgcttgtgataaacgtagacagcaccgttacatataaatctctgaccgcttctgtgtcattcgtaatgcgggccacgacctttccggcgggcagattatcaaagtagcggatcggcattttctgaatgtgcgaaaatacatcctgcctcatgcgctgtatgatccggtttgctcccatctgcagcaggtaatgctggccgtaatgaaagcacacggaaaacatgagcagccccgcatatatggcggtcaaagtcagcagtccttttatttccggccggtaaaattgaaaaatttcctgtttggataacgtaacggcgggatatgacctgctttccttaccgtttgatatcgtcagccggccgtcagacaccgaacggtttccgtcaaaactgacggggcggtcaacaaaatagtaggccgcaccgacttgataaatgtgcacctctccggttttgtccgcccccggtttgatccggtcttccctgacataatcatgcccccggaacctgacggcgcccggatcgtccgcagaggctttataccatattttttcaatgccgagaatatgatcgtcaatcattttttttccgataaacgggccggtcagctcagtgccgaccgcaataataagcagaacgaccgcccaaatcagcagttttttatattgaagcgcgtaattccataatcttcttccggtcttcatgcgctggtccccccttcttcaagagaggacagctgctgcctctcatattgttcccgataccagccgttctgcgccaatagctcctgatgtgtgcctctttcagacacccgactttcgtccatgacgagaatgagatctgcgtgttcaaccgccgagagccggtgggtggtgataatcgttgttttatcccgccgttttttacggatgctgtcaataatggccgcttccgttttcgcgtcaacggcggaaagcgaatcatctaatatgaggatgtcgggatctgtcaaaagcgctctcgcaattgagatgcgctgcttttgtccgcctgagagcgctacgcccttctcgccgacaagcgtctcaagcccgtcggaaagcatgccgatatcgttttcaaaatgcgcatctttcagcgcgctgccgatttcttcttcgcttgcgtcctgccgtccgtaaagcagattttcctttaccgtctttgaaaataaaatatgatcctgcggcacatagccgacccacccgcggagctgatcaagcggaatttcctgaatcggtacgcctgtgaacgtgatcgcccccgcaccgggcggatattcacgcaaaagctgcttaatgatcgtcgtctttccgcttcccgttttcccgacaatgccgagcgtctgccctttttctacggaaaaagagacatcagaaagagccggtcccgctccgctcggatacgtaaaggtcacttgttcaaaaacgagacgcccgggctccttgatacctgcgggatgcttgggcccgatcacgtcaggctcataagaaagcgtctcattgacacgatccaaggaggcattgccgcgctgcatgatattgattaattcgccgatcgcaaacatcggccagatcatcattccgagatacacgttaaacgatacaagctctcccagcgtcagccggttttgaaaaacgagataggcgccgtagccgagaccgatgaggtagctgaggccgacgagaagtttcacagtcggctcaaagagagaatcgataaacgccaccttcatgtttttctcatatacatcagccgtcatatctccgaatcggctgacatcatttttttcctgcacgaaagcccgaatgacccggacgccggataccgactccagcaccttgtcatttaatgatccgaaagcatcctgcgcttccgtaaaccgctcatgaatcttttttccgtacagactgaccgcagccgccataatcggcagcgggataatcgcggcgaatgtcagcttccagctgatgacaaaccccatcgttaaaaatatcgtcagcatatacatcgtcgaatcaacgagcgttaagaccccgaagcccgtcgtcatactgacggcctgcaaatcatttgtcccccgcgccattaaatcgcccgtcctgtatttctcaaaaaacggcggtgacatgtgaagaagttttcccatcagctttgaacggagaatcttctccatgacattcgctccgccgaaaagctgatacatccaaaaataagacagcaagtagacggctgccgttaaagcgagaaaaacacatatataaaacagcatcccgcttttcgtaaacacacccgccttcatatcgtctattgcgttaccgagaagtttaggcggaaacatttcaatgacattcacaatcaataacagaacaatcgccgtcgtatagcgcagccaataggctttaaaaaaccaagccagcttttttaatacagtaaacaaataccgtcatcccctttcattagtcagcctccctcaagcttttccggattgttgtacatttttttcactaataccgccacatgcatcacacctgtctttcttcatttttttgtataaaaaaagacatgaagcgtcagctccatgcctcttattatgataaataaggtacagacccgccttttatgcgcgactgcaccgtttttaagcaaatgttcagaaaacggaaggtgtatggcagtcacgccggtatttagctgaagctgagttgacacgctgtaatgttgacatgatccatacctcctttttcctatattcttccttcatcatataaataaatccttttattgtcaatccgggttttagcttttttccaaacgggtattgttctgcaaaccttttttactgaaaggatgaggccgatgtttcatgcggaccggttgattgcagcttttgacggaagtgatgacagtaagaaagcgctacaaaaagccatagacctttcaaaaacgtttcacgcggatttaacggtcgtgcattcccacaatgcaaaagatacccagacgattgttgatcctccgaggccgggagccggggcgacgtatatcggaggcgggattgcaagcgttcctgatccgctccaagcggaaagaatctcccctgatcccatgatttatgaagaccgcacggaagaaatcattgccgaagcgagaatgctgatgaacgacgcccagattgacggggatatcgacattttagaaggtgatcccgctgacgccattatcgagcatgccgaccgcatatcggcggatttgatcgtcatcggaagccgagaccggaacaggctgaaaaaacttttattcggaagcgtcagtgaaaagctgtcgtctaaatccgatattccggtgcttatcgtaaaatgatctttctatgcagcagctttataaaaagctgctttttttctgtgttcgtccgtgcatgaagacgatttacatctcccggctgtttcctctttttttcggcatcacaaaaaagctcgccatgatcaaaaaatcgatgcacaatacgacggaccagccctttaacaggccgcttatcgcttcggtccgggaagcgtcgtgaatgagaaataccgttccggccagaagaatgccgccgatgataaacgctaatacatgcctcccccatccttttgcataatgtttggcataatccagtccgtaccgcttgactggttttgccccttcctttaccacataatagcggaaacgctcatccgcccattgaatcatgctttttccgaaggcgacagacactccgatgtaaacggcggccaaagcatgcgccaaagtcgctgtcgcccctctgtataaatcagccgcggccgcaagaaacaatacggcatccaaaagaggaatgagagcgaaaaaaaacattccgagcttttgccgcctgaataaataccgtgccgccaatccgcagatgacagccgcccaaaaagcagcctcacaaatgacaatcaaccaagcaactgcgttcaatccggttcccccttatcgttttctaaaaagcattgtaacacctctttttatttaatacaatcgtattacaaaattgcaagaaaatttttttcctgttacactggaaccatgcctaaaataatcgaccacgaaaaaagaagaaaacaaatagccgaagccacatggcggacgattttggagcggggcatggaaggagcgacagtgagaaacatcgcccgggaagcgggtctttctttaggcgcgctgaggcactatttcaccacccaggacgagcttttggggtacgcgatgacactcgtaaaagaaaaagttgccgccagaataaacgaagtcgccatgacagatctgccgccgaaagaaaaagcggtgcgtctgatgcttgaaatcatcccgacagatgaagaatcgatggctgaaatggaggtatggttcgctttcacagcttacgccagacataagggggaagaatttcatccccagcatgacgggatcttggaatatatccgcagcctgattgaatggctggatgaaaataagcatctgaaaccaaatcttgataaagagatagaagcggagaaattgtatgccatcgcagacggattggcgctgcatgccatgcttgaaccgaatcgtctttcaaaagagaagatctcccgcgtgctcattcagcatatcgaatctctttttatctaacagaagcaaaaaggccggatgtgtttccggccttttttccgcttatgattgaaccccgatctcctgctgaatgcgcgactgaaaagcctccagaattgttttggctacaggacccggtacaccgctgccgaccggttttccgtcaagggttacgatcggaattagttcagacgtcgttgacgagataaaaatttcatccgcgcctctgagttcgtcttcagtaaggggcttctcccgcacctcaatcccattttctttcatcagttctaaaagttttattctggtaatgccgtttaaaatcagctcgtttgcaggatgcgtccggacggtgccgttaatgacggcgtatacattggaggaggttccttccgttaccgccccgtctcttatcagcactgcttcatatgcgcctgcttcatatgctttttgtttgatcatcacattatacagtaaattcagactcttaatgtcacatctcagccagcgtttgtcttccgccgttatggcctgcgctccggctttttgttcattttccggttttttcactgaaaaggtgtatgccgtcgtctgcggctccaatcccttgtcatactggtgctttcgcggcgccttccctctcgtcgtctgaatataaactccgccgtcaatgagtttgttttcctgtacgagcttttgcagatcccattctatgtcttctgcggagaacggcagggtgatgccgatttctgcggcgcttctgaaaagacggacgatatgctcccgcagtccgaataaggcgccgttatacactctgatgacttcatacacaccgtcaccgaattgatatccgcggtcctcaatatcaactgccgcttcctcacgatcaatcaactggccgtttactaatgccttcatgtaaaccctcctaatcgttatctgccgtgatgtgcattctcagctgttattgtcaactattctatcatattgaacaagcaagccggcagcggagtttatttttttcttaaaatcttatcattcgacatattttctatgtcttttccagttttgttcctgtatacttgattcgacatacatatgctgttaacttatggcactttgcaagcctccgttgttaccagcattatgaagaaatttatgctactggagagattgttatgcgcaagacaaaagaaggtgcttccccttctctgttttcattggcttttaaacttacgagtttagcagttttgtgcggactgcttctggtaatcgtcataatgggttattccgcttccgccgcaaaaaacaaacaggtcaccgtgaccgcaaacgggcagcttcgagatgaaacagaaagcctgcggctgaaaaatgattctcccgacgtcttacttaaacatttgcagaaagagcaagacacagggaaaaaaacggtatatttaaccttcgacgacgggccgtctccatatactgaacagctgttgaatgtattgaaggcaaatggcgcaaaagccactttttttatgcttgaaccgcggatgaaagcctataagcattccgtggaaagagcgaaccgggaaggaatcgcgctcggcctgcatggcgtgacgcacgataatcatctgttttatcaaacaccgacatcgccgctgaaagaaatgcagcagggacgcgatacgctccagacaatcacgggagtgaaaacggatcttgtccgtacgccttacggcagcaaaccgtcattgacagacacccagattaagcatctcgaaaaaggcggcttcgtgtactgggactggacgatagacagcgaggactggaagtacaagaatgcccggtatgtgccggaagtgctgaatcagctcgcatatttggaaagcgttcatacgagcaggccgcatgtcattttaatgcacgatctgcctgcgacggtgcatgctttgccgagcctgatccaaaaactgaaagctcagggctactcatttgacgtgctgacggatcaaatgattcccgtccatgaataagaaaagccggatctgtatatgatccggctttttttatgtcgcggtgctgatccgctttgcaaattcaccgatcttctcatgaatgacaagatcaaataaatggtcgcaatatgtcggctcaaggttaatgatcacttgcttcaaaccgggaatccggctcgcatcctcagggacaaaccttgccggcgccacctcaagcgaagtgccgatcacaagaagaagatcggctttatcaagcttttcataaagggtttcaaaatgctgaacaagatcgccgaacaggacgacatccgtctttaatacagcgccgcatacctcatgatctccggtttccgccgtacattccggcacttcttccttcagcagatgtgaaagcccgtagcgcgctccgcagcgggggcatacggcggtctgaattgaaccgtgaagctcatagacactgctgcttcccgctttcctatgaagcccgtcaatattctgcgtgaaaatgtctacctgttttccccgcttttcaagatccgccaaatacttatggccggcattcggttcataacttccgctcattttcatctgaaacagctgtttgaatttaggccagaagtcgcgcggacggcgttcaaagtattccctgctcatcgcttccattctggaggtgtcttcggtccatatcccgcctgccgaacgaaaatcaggaatgccggattccgtgctcatgcccgctcccgtcagcaccatgatacgttcagcctgattgatcaatgtcataaacgcttccactcttccaccgcctttttctttttatcatatcatgaaaaaagaacggcgcctgttatgcccgttctttttctccggaatgaccattgacttgaaccggttcatcctgatttttctgtttcacaaaaaccgtttggcccggataggcgaattccacgccttcctcagcaaaaagatctataatccggcggttgatatcctgccgcacatccaggctttccgcccagacgatggtctttgtgtagaagttaaaaaacagattgtaatagctgtctgcaaacacgtcaaaatgaaccataatcgtatcatcatgtacgccttcatgttcacgcagcatttctctgagcctgatgatgcaccgatctaaacggtcaatcggcgtcgcataagagacacgaacggaaaacgtaacctggcgcttcgtcattctcgtccagtttgtgatggcttccatggacagcgttgaattgggcacggtgacaagcgccccctgcgccgtgcggaaccttgtgcttctgaatgtaatatcttctacgccccccgtcacagacgacgtctcgacccagtcgccgatcgtaaacggcttctccgtaataatgatgatgccgccgaaaaaattgctgatcgtatctttagccgcaagtgcgaaggccagcccgccaagtccgagtccggccacgaacccgtttacatcataattaaattcctgcgcgattacactgacgctgagcgcgagaatgacaaagcgcagcaccttggataaaaacggcgccaaaatgtcatccatatcaagctcaaagcgctgattgactttatgaaataaaaaggaagacgcggatgtcagattgcaaagcccccaggcgatcagcgccacgatcagagagcggtacatttttttgacaatgtccatctgcccgtctaaaaacggcgaatactcaatcgccaaaaacagccccagcgccacgaaaaaccatctggccggcttgtcaaacgcgatggcaatctgtttgaatatgtcggttttcggtttgttcgccaatttataaacaagctgaaaaaagtatttgacaaacagctttctcaaaatgagaaaagccgctaaaattccaatgctgataccgatctgtgaaatatggtcaagagtaaaaaagctctgaaaatgtgtcatcatggcatatgctcctttgtcttgtcgaaaatccattatactaaaacattcggacatcagcttcttttaatgtcttcaggcagcctaaaaaccccggcagcagaacacagccggggttttcacaaaattcgttcatctttcagccagatacaacaggggcaggcactatttcttcttcgattgtgtctgtttcaggagagtcgctttttgaatttcagcatcggtttcggctttaattctttcttccactttcaatctcccttttcccatgatctcgcctcctttttgccattataaatcaccactgcggattgtaaaccgaaaaaagcactatcttcattccaaaaaaatcctctttcgcacattcaccagtttgaatcgctgtgcatatatgaatttgatataataacagaaatgcccttgaggggagctgacaagcttgtataccatcgcccatcgcggcgcatccggttatgcgcccgaaaatacatttgcggcatttgatatcgcggccgaattgaacgctgatttcattgagcttgacgtccagctcacaaaagacggacacattgtcgtcattcatgatgacagagtcgacaggacaacggacggctccggttttgtaaaagattacacgctgaagcagctgcagtctttggacgccggaagctggtacggagctgagtttaaaggagagcggattcccctgctcgaagaggtcttgaagcgctatcattctaaaatcggatttttaattgaactaaaagggcacgcttctcaagtcggtcttgaaaaagcagtcggccagctgttaagcaagttttccttttccatttatcatatcgttcaatctttcagcctcaagtcgattcagatctttcatgacatgtatccgtccgttccgactgcgatcattgccaggcccagctttgggatgttttccaaaagccagctgaccgcctacaaatcagccgcaaattatgtcaatattaaatacacccgcctgaatcggttcttgatttccaccgcccacagacacggcctgaaagtatttgcatggacggtcagaaacaaaaagacggccgaaaagctgcaaatgatggcagttgacggcattgtaactgattttccggattttatttctaaggatggctgatatgaaacaatacatcgcaatttttatcggaggggcgcttggcgctttgctccgctttgaattgagcacgcacattcacagcagttctttccccgcggctactttcctcgaaaacgcggcgggaagccttttacttggtcttatcacgggttattttgtcattcgggcaaagcgccctcttctaaccgcctttttcggaaccggtttttgcggaggtttcacgacgatgtcaaccttcgcaaaagaaaccgtctttttgctgcaatcgtctcccgcagctgctttttgttatgctgccgcgacattattcgccggccttgcccttgcgtatgccggcattttctgcggacggcggattgctctccgttcagcgggaaaggggcatgaaacgtcatgacgattgttttgatgcttatcgcagcgggaatcggagcggtattgcgttttctgctgggtcaaaccatttcagaaaggacaaaaggttttccgattccgcttggaatggctgcggtcaacctgctcggctctttcggtctcggcatgttcaccggactgggtctggataatccttccgccggtatcatcatcgcgacaggttttttcggtgcgtttacgaccttttccaccttcagtattgaagccgtgcagctgatgatgaacaatcgcataaaggaaagcctgctctatatcgcagtttcagcagccggaagccttttggcgttctggtgcggcctcattatcatatccatttaaaaaaaccttgagcttatttttcgctcaaggttgcgttatgaagcatgaccgcttcaggcacgggcagggggcggtttattgtttcctgaccgccagcgcggccctgttcttcttttacttcaagacgtttaataaaccggccgtccatttctaatacgaggacagtgtatcccccgatctgtatcgactcacccgaacagatatcaatattccgcttcagcacaagcccgccgatcgtgtcgacttcctcttcaatccctgcgccgagcagatgatttacctgatcgatgcgaacctttccgtccagcacataatggcgttcggacagcttttgaatcagcggctgttcgtcttcatcaaattcgtctctgatatcgccgacgatttcttcaaggatgtcttcggtcgtcacaagaccggacgttccgccgtattcatcagataatatcgccagatgaatacgctctctctgcatttttatcagaagatcgtgtatcggaatcgtctcgatgacttcaatgaccggacggacgtaagaggcgatggatacttccgctttttcatcttctgtcataaacagcagatctgaaaagagatgcttcgtattgatcatgccgataacgctgtctttgtccccgtccgttacgggccagcgcgtatatttatctttcagcatcatatcaagcatttccggcactgacatatcagttgaaacagcggcgatttcttttctcggaatcatgatttccctggcgatccgattatcaaactcaaaaattttattcacaaatgtatattcagacggattgatttctccgttttttaaactttctgacagcaggatccgcagctcttcttcagagtgggagccttcatgctcagataccggctttaatccggccaaaccggtcaaaattctcgcggagccgttcagcacccaaataaacgggaacatgaacacgtaaaataaccgaagcggccctgcaatccataacgtcagcttttccgctttttgaatggcaaccgttttaggcgcaagctcaccgacgacgacatgtaaaaatgtaatcagcccgtacgccgcggcaaaagcaatcacatgctcagcagaatccggcagtcccataccccgaaacacaggatgaagcatccgctcaaatgctggctctcccagcaccccgagcccgatggatgtcagtgtaatgccgagctgcgaggcggataaatactcatcaagatccgtaatgatacgctttgcaagcactgcccgtctgttcccttctaggatgagctgatcgattctggatctcctcactctgacgatcgcaaattcactcgccacgaaaaacgccgttaacgcaatgagcacaccgattaaaatcaaactgtcaatatcgtccatttcaccttatccctgattgaaggataaggacgtcacctcctgatttcatcattttttcttaagcgagaggaacgaaatgggtgattgactatgcagagggccccatcctgccacctcctaagtcaaagcatgattataatttgtatattttattgtatcacaactcaattctttcttcattttcagatttttttatcatataaaaaaacagccttcaaaaaagaagactgccgttatctgcttcggaaatgattttctaaacaaagcgccgtattaatccctccgaatcccatgcttaagcttagcgcatggtgtacggtatgggcgatcggttcgtccgtcacccactggaatgcgccgtcgatcggctccgttaagtttctggtcggatgaagcttggattcccgcatttgcaggagcgccgcaatgatttctaccgttccggccgcactcaggccgtgacctgtaatcgattttgtcgcattaatccgtgcgtgcgacagaccgctttcagaaagcgcccggcattcagtcttatctccgatcggcgaaccggtgccgtgcggattgatgtaatcgatctctttcgctgaaagaccggcccgctccagtgcctggcggatcaccgtcatttcaccctctgctgaaggattcggattgcggttcgcatcggaagccatgccccagccctttaagccggcccatgaacgcgcgcccctctgttcggcagattcagcgcgttccagcacgatcgccccgcacgcttctccgaatataaacccgtccgtatgccggtcaaacgggcggcaagcggcttcaggacgttcagcgtatgtatcggtgcccattgctcccagtgagcggagagcgtgacactccatatacgacagatcggccagcgccccgatcacgatacagcggtcaaacaggccgccattgattccttgagcggcctggataaccgccgcctgaccgcttgccgacgcgccgccgaccgtaaaggccggcccttttatcccgaattgctccgtacaaagccccgacaaatcactatccataaaagaaagcccgtacgtcggattcacaaattgcggcatttcaccgtttttctcaaagacctgcatcagttcgcgctgcgtcgtatttgaaccgccgatgatcagaccggtgcggctgtgatcagcgccgtctaattgagcgtcatgccatgcctcatataaagcgataagcgccgcctttcctgataatgcggcccttcggtacaagcgcttcgacagcgcatcaggcggcgttaatccgctaagctccgcgccgataaacgaactgcctttctgccggccggggcgtttcatcacatcgaaggcgtgccgcccatccataagcgcatcaagaaacgcctccttgccttgtccgaccgcggttaagaccccgattcctgtaatgctgatgtctgacgtgccatcatttctcctcgacatttgaccgttctcccatctttatgtattggaagctatgaagaaaaatcttgatacagtgctttgaaaatgtcccgcgactgtctgatctgttctgaaggcacgctgaaagataatcggaaatagccgctttttccaaatccgctgccgggtacgatcaatagtttatatttctgtgcggcatgcatgcagaaagccacctcgtcttcaatcggtgattttggaaagacgaaaaagcctcctttcggcatttcaaattcaaagccggcttctgtgaggatgtccaccataagatctctccgctttcgataaggttcggcgtcaatcgaaagatcgtccattttcgctattgcgcgctgcatcatgaccggtgcattcacaaagccgagcgtccggttgcagaaaacgagcgcatccgtcagaaggccgcgctcaggtatttgggcgtctgttgcgatatacccgagcctttcccccgcaatgccgagatctttactgaacgaactgactaaaataacgcggtgatacgcctgaaacggattcgcctgttcttctccgtagatcagctggctgtacggttcatcaaacaaaatgaagatgctttgcccgttccgctcctcggcttcttttaataaggcgcccaaatcattaagatttttctggttcagcacagtccccgtcgggttatgcggcgtattgacgatcagtcctttcgtacggggagtgatcgcttctctcaccgcttcaatatcaatctcaaatgagtcagtcagcgggcagatgacggggctgccgcggtaattttcaacatacgctttatattccgcgaaataaggtgaaagaaggatgacttcttcccccgggttcaggatgctcttcagcgcaacattcagcgctccgcctgccccgaccgtcatgactgtatgcctggcagaaatctcggtctgaaaccgctctgacaaaaagcctgcaaccttctctctcgcctccggaagcccctggttttgtatgtatccgtgcctacctgtttcagccgcttcgcaaagcgcctttttaaatgtttctggcggctccgcaaccggatttcctattgaaaagtcaaacaccttatcggcgccgaattcttttttcagccgcgcgccttcatcaaatagttttcgtatccaagagcctttctccagattttctgtcacttcccgtgataaaccggccactgtcatctgtcccttctgtctttttcttccgtttctatttacaatgattatgaaagatttacatggcgcagtcaacgctttttccggaagcctgccccccgtttcagaggaaagacggaaaacaataaacttgtgcaaactccccttcatatattaaactattctcataactataacgtgatggttggggagggatttagatggggctgagacttatcgcatcagtgaattagcagagcttgccggtgtaacgaaacgcacggtggattactatacaaacctcgggcttttgaagcctgacagatcttgctcgaactaccgttactacgatacacttgcactcaatcgattacagtttatagtcgcttgtaaaaagcagcgattggccctgtctgatataaaagaccgactggaaaaccagtttccctcttcagccttgcctgacgatattggaaatctggcatcggaaattgatcatatgaatcaaaacatctccgggatcctgcatcggtttgaaaagcttgaaccagaggagcgcgcccagctgaaaaaaaggctggctcctgaaaagcttgcagtgcttcaatcatttatgctgctgttaagttaaaccattatcttactaacaggaggtgttaccttcatcttcccaaaaggagtgaaggttctaattggacattgtgaatttgattttagtcgcggttttaatcgcgctgacggcatttttcgtagcatctgagtttgcgataatcagaatcagaggctcacgggttgaccagcttatagcagaaggaaataaagccgcaatcggtgtcaaaaaagtgaccacgcatttagatgagtatttatcggcgtgccagctcggcataacattgacttccattggtcttggtgtcttaggcgaatcaacgattgaacgcttgcttcatccgcttttcacaaaaataaacgtaccaagctcactatcgcacattatttcatttattctcgcctacgcgatcattacgtttttacacgtggtcgtcggagaattagcgccgaaaacagtcgccatccaaaaagcggaagccgtttcgatgctgttttcgaagccgctcatttggttttaccgcatcatgttcccgtttatatggcttctgaacaactccgcccgtcttttaacgaagatgttcggtctggagacggtgtctgaaaatgagcttgcccattcggaagaagagctgcgcatcattttatcggaaagctataaaagcggtgaaatcaaccagtctgaatttaaatatgtgaacaaaatctttgaatttgacgacagactcgcaaaagaaattatgattccgcgtacggaaatcgtcagtctgccgcatgatatcaaaatctctgaaatgatggagatcattcagattgaaaaatatacacgctaccctgtcgaagagggtgacaaagacaatattatcggcgtcattaacattaaagaagtgctgaccgcctgcatcagcggcgaagtatcagtcgactcgccgatcaccgattttgtcaatccgatcatccatgtgattgagtcggcaccgattcacgacctgcttgtgaaaatgcagaaggaacgggttcatatggcgattctgtcggacgaatacggcggaaccgcggggcttgtcaccgttgaagacattatcgaagaaatcgtcggggaaatccgcgatgaatttgatatagatgaaatcaacgaaatccgcaaactcggcgacggccattacatgctggacggtaaggttctgattgatcaagtgaacgagttgctcggcatccatttagaaaatgacgaggtcgacaccatcggcggctggttccttacccagaaatacgatgttgaacaatacgattcgattatcgaagaaggctgcgaatttatcattaatgaaattgaaggccaccacgtcgcatatatcgaagtaaaaaaactggcgtttgatgaactgctggaaaccgctgaacaaaaagaagcataataaaaaagcttgcgcgtctgatacagacggcaagctttttttgtttacatttgatcaagttttttctcaagctctttaattctggcattcagctcttctgtcatggccgcaagcctctccttcggcgcaaaatcagaaaagtcctccaaaaaaatcggctcgccgatgatgagccgcatttttccctttttaaacagctctttacccgaagacgggcctctgtatgcggccggaacgagcggcgctttccccatttgggcgatggtcacggctcctcttttcagcgggacgtcttctgatgttctcgtgccgctcggaaagatcccgacaatctgtccttccttcagaagcttaatcggcgttttaatgctgctcggacccggattttcacgatcaaccgggaatgcgtgaatcttcttcaaaaaacccccgatccactttttctgaaacagttcttttttggccatataatgaatctgatgaggcaatattccgacaccgagcgtgaggacgtccacccagcccgcatgcgtgcacgcaataacgaatcctttatcagacggaagattctccttgttgtacactttcactcccccgcgcagggaaagaatggcttttatggcatttgcacaaaacttatacataacgcacttcctttgttgtaatgatcaaaagtgttctccctctattataacaatattttttattacctggtactaataattatatttttcctttgccgatccctatcttttatgacggattttgggtactataaagaaatggtgtttgattaggtgaaaatgaatttaagccgtttgcatggaacgtgcaactttaaacctttcttatgcgtgtataacatagaggggagaaaaggcagtgacgatcgatgaaatttaccaaatgtatatgaatgatgtttaccggttcctgctctccatgacaaaagacaagcatctcgctgaagatttgctgcaggaaacctttatgagggcatacatacacattcactcctacgaccacagcaaagtaaagccatggctttttcaagtggcgagaaatgcgtttatagattatgtcagaaaacataaaaaggaagtgaccatttccgatgacttaattgggagcctttttcagacggctgttcaaagcccggctcatcagattgaaatcaaggaagtgctgacagggtatatgtccgaacttcccgacaattatcgggaggccttaacactgtattatttaaaagaactgaattacaaagaagcatcccatattatgaatatttcagaggctaattttaaaagtgttttatttcgtgccagacagcggctgaaagcactttataatagaggtgttaatgatgaatgaagaatttaaaaagcgtttttaccaatacaaaaatggagaaatgagcgaccgggaaatggccgcctttgaagaagagctggaaaagctggaagtctatcaggaattgattgaaagtgaaatgcaggacgaccgggaatgggacgtcggcatcagcccggaaaaacagaaggctattttatcatacggaaaacgcaaatcgtatttgcggatttcagttctcgccgtcatttccactttgatgattttgccgctttgtactttgggaagctacctctattacggtttgggaggaaaagaaagcacaggcaatcaattaatggaaaccgcggccgtgacagtggcgaccacaatgccgaacgtcctcgtcgatacctccggactgaaaagccaggtgaaactgtttggaatgaatacggaatttccgctgcaaaagcagattggcacaaaaacgaaatccgtcggcggagaacggattgaaatgtttttagatacagtcaaatcgcctgccgttaactactatgatctagacgcggcacaggcaaagcattatttcgcccatccttccggcttaaaggaacgcacgattgacaaagccggacagacattaaaaaaattgcctgaaggaagcgtggcggaggtctatctttcttatgaccgggcctatccttcttctcaagtatattcaacttttaaaaaatacgatgtgaagtttttatggaacgcgatcgaaacggagaaaaacctgaaagacagtccttatgccgatccgttaggatttcccgggaaagattctaagctggctccctctttcgaagcgcagggacagacagaccgagaacaatttatcagcgcccttgaatttatgtcccatcataaaaaatgggcgcaggtgatatcgaaacgcaaagacatgaaactgagcagcagaatcgactatgttgaacatcacggaatgaacgtatacggctctgtcgtgacggggccgacaaaagaaatcgaacgtctgctgaaaaacaaaacagtcaaagcagcaaacatcggtgaggtggaattatggaattggtaagaatctttaaagagcataatgttttcggctggatatcggtcggtaccgcgattttgtcgctgctgcttttgaatgtggcgatcatcagcaatgtgacattctattcttatcagatgctgccgtttgcgatggccgccgtgccgttcggcatcattgagctgtttattaaaaaaggacggaccggaccgggactgctcggtgtcatactcaatctgttcgtcattgtctgcgtatatacgatcgttgcggttgatacgaatctgcaattcggtttttaagcataaaataaaaacaggcccttttacggggcctgtttttttaaaatgaaagaacgccggttaaatgcagcaatacgacaatgatagccagcggcacaagatatttcagaaggaaataccacagctgaaagaaacggtagccgatggcggagccgcttttcatctcggcaaacagctcctgcttcggtattttcagcggaataaagattgatattaataaggcgccgagcggaatcagcacattgctgacggtgaaatccgcaagatcaaaaaacgtttttccgaacaaatgaacatcactgagaacaccgtatgataaacaggacggaattccgactaagaaaatgagcagaccgcttgtccaggacagcttctttcttttcgtttcatcccctttccccacagtcgccacgataatttccaccatagaaaaggccgaagtcagcgcggcaaagaaaaagactgcgagaaagctgataaaaaacagcgagccgaacggcagccggtcaaaaacagccggcagcacggtaaacagcaatgtcggtccttcatccggtttaaatccgaacgaaaaaaccgccggaaaaatggccagtcccgcaaacagcgtgacgagcacattcatgataacaattgaacctgccgagcccgggaggttttgggtcttcggcagatacgaactgtacgtcaccatgaccgaaacgccgagcgttaatgtaaaaaacgcctgtcccaaagcatagaggatggattccggcgtcaaatcttcaaaatgcggaaccagtaaaaatttaatcccctcaacggcatgatcaagcgtgacagagcgcagcacaagcaacagaaacagcacgaataaaatcggcatcagcaccgcactgacacgttcaatccctttctgcacgccttttgcgacgaccgcaaccgtcatgatcataaataccagctgcgcggcgagagtctggatcggattttcaatgaccgtaccgaacaccgtaccgtactgctcctgagtgagtcctgataaagaaccggtaacggctttcagcacatagagcaaaatccatccgccgacaacactgtaaaaagacaaaactaaaaaacaggccgccacacccacataacccgtgaggtgccataccgactttggcgcggcttgtttgtaggcatcaatcgcatttgtctggccccgtcttccgaaaataaattcaccgagcaaaagcggatagcctaaaagtacggtaaagaggacgaagacaagaaaaaaagcgcctcctccgttcgtacccgctacgtaagggaacttccaaatggctcccaggccgatcgccgaaccggcagcggccataataaatcctatttttgaggcccattgaacccttttttggtcagacacgactttccacttcccttccgccctatattatcccttattcgctgcgataacttaagcccatttcaatatgtttcactcttctgaaaaataaaagaagcggctgatgccgctccttacaaatccccgtttaattttgaatgctttctcgaatataagaaataaatcaccaaaccgatgatcagccagataaagaaacgaagtatggtggcggcgccaaggttaattattaaaaacacgcagaacagaatggacaatgccggaataaagggaactcccgggcatttaaacgctctcggcagatcgggctgtttctttctcagcacgataaccgccacggaaatcaggacaaacgcggcaagcgtgccgatgttcaccagcttcgccagttcatcaagcgggacgagcgagccgagcaatgccgacagaataccgaacacccatgtcaccacatgcggcgttttatgcttcggatggactttcgaaagcgcacccggcactaaaccgtcacgggacatggcaaacatcaccctcgtctggccgtacagcatgacgagcatcaccgttgtcattcccagcaccgcgccgatatcaataatgcccgccacccagttctgcccggccatctgcaggacgagagaaaccgggtgatcgacgccttcaaagcgggcaaacggtacgacacccgtcataatcgccgatacggtcacatacagcacggtgcagacgattaatgaaaaaataattcctttcggcagatccttcgccggatttttcgtttcttcagcggcggaagagacggcgtcaaaaccgataaaggagaagaaaacgagcgccgcggcactgaaaacaccgccgaaccccatcggcataaacggctgccagttgtgcggtttgacatatacggccgcaacggcgataaacaataaaacaaccagaattttcagaattaccataatattattgacccgctttgattctttaatgcctaagtagaggataaatgtaatcgcaagcacaataacaaatgcgggaagattaaagaatgtgaccgtgcctttaattgatcccggcgcggccgttaatgcggccggaagatgaatgccgaagccagccaaaaatgattgaaaatagccggaccagccgaccgaaaccgcgctgacggcgagcatatattccaatattaaatcccatccgatgataaaagcgagaagttcgcccaatgtcgcataagtaaatgtatagacggaacctgaaaccggcacgcttgaagcaaattcagcatatgacaaagccgcgaataaacacgcaagagcggctataacaaatgaaatggtcagccccggtcccgccgtgaccgcgcctgttccggttaaaacaaaaattcccgttccgatgatagcccctatccccagcagggtcagatcaaaggctcctagctcccttttcagcgacttttcgccgccggttgcggcaagcagttcctgaatgcttttctttctgaatatgctccccttcatctgcttcactccttgtatatcaatctcttatgttagaatattcagataacaatggatgtaatgactaaattcttatttttcgcatgaaatatttcagcacatcattcctttctcctataccatattataacgaaacatataaaaatgaaaataactttttgaaaattctatatattatttttatgatttcttaaagcaaaacggaacccataacgtcccttcatacagcgggttctcatgtattacaatctttgagttcacgatttgactgacagctgccgcatgatattaatatgtatgttcaaataaaaatcccgcaccttttagcagtgcgggataaggcttacggattatgtggaaataaatcttccgccatttacgtgaatggtttgacctgtcatataggaagattcgtctgaagccaaaagcacgtaagctccggcgtgttccgccggctgtcccggccgtcccatcggggtgtccagaccgtggttttctaccttttcttcagtaaatgtcgcgggaatcagagcggtccagatcgggcccggcgccactgcattaaccctgatcccctgatcggccaatgacatcgccatcgaacgtgtaaaggaaacgatgccgcctttcgtgcacgaatagtcgatcaatgatgtatcgccctgataagcggtaatagacgttgtattaatgatggcgctccctcttttcagatgcagcttttgtcatatgaaacatggaaaacatgtttgtgcggaatgtcttctccagctgttcagccgtaatatcaaggatcccgctttgcggatgctgctcagccgcattattaacaagaatatcaattttcccgtagtgatctaagacttgccggactgccttctgacaatgcgcttcatcaccgacgtctcccggaattaacaggcattcggcctggcattcttccgcgcgctttttcgttctctcggcatcggcatgttcgtcaagatacaggatggcaagatccgctccctccttcgcgtaagcgatcgcagccgccgcgccgatgccgctgtctccgcccgtgatgacggcgacttttccttttaatctgtccgacccttttacatccggatcttccagaaggggcttcgggtccatttccgactcaatgccgggctggcggttttgcacctgcggtttttgtccttccgtttgtctgtccatcggattcatattctcacactcctgcaattggtattactgagacgataccacgcagtgcggagagctaaacggataaatatgccgggcttaaagcggctgagccgtttcgggtaaggtaccggtgtatttcgcagacggcctgaaaatcatattgtcagcggactgttcaagtacatgggcgcaccagcccgtcattcggcttgctgaaaaagtcggcgtaaacaactcattatcgacatcaatggcctgcatcacagccgctgcgtaaaattccacatttgtatacagcttccgtcccggcttatattgctctaataagcggatggcttccttctccacataaagcgccaagtcaagcgacggatcatttcccgctacctcttcagcctttatgcgcagcgcttctgcccgagggtcttttgttttgtacactctgtggccgaagcccatcaggcgctctcccctcataagcttctgtgtcaaataggcttctgcgttttctttttcgccgatgtcttcaagcattttcgtgacacctgaaggcgcgcctccgtgcagcggccctttcatcgtacccagtgcggaagtgacggcagacactaaatcagattcagtcgaaacggtgaccctcgctgaaaaagtcgatgcattcatcccgtgctccatcgccagaatcatatacgtctcaagcgctttcttctgagctgcggacggctgcctcccggtcagcatgtacaaatagttttccacgtggccgtatcgtgcttcaggtgacaatgctttcagcccttttttccggcgatatctgtacgcaatgatcgtcggtgtgacggcaatcagtttaatcgcttcttcctgctggggcggatatgtaaatgaatctgtgcccaaacctgaaatagccgttctcagcaccgccatgtcgtccatctcgtccggaagcgtttccaataagccgatgagatgctgcggaagcccgcgctcagctgcaagttcatcctgaaacgcaagcaattgccgctcatccggaagcgttccgtttaaaatgagatacgccgcttcttcaaaactgcattgcagcgcgatatcctttgcgtcatagccgcgatatattaaatgccccttttctccgtcaatgtggctgatagccgtttctgcacaagtaattcctttcaatccacgataaatcaatttcattcccccttatcctctttctgttattatagtaaatataatatttaaaaaataatgaatatttttaagggaattaattaaaacttttaatcagaggagtgcatctatggattttaaatggcttcacaccttcgttaccgcagcaaaatatgagaatttcagaaaaacggcggaaacgctttttctatctcagccgaccgtcaccgttcacataaaattattagagaaagaaatcagctgcaagctgtttcaacgaagcgggagaaaaatacaattaacggaagaaggaaaagcatacgtgccgtttgccatgaggcttttggaggattatgaaaacagtatggcggagctgcacagggtgcgccagggctacttccacacgctgacgctcgctgtttcgcctcttatcgccgacaccgttcttccgtctgtcatgaagcgttacacagcggacaataaagagactgaaatgacggtcaccatctacgagtcggaagaaatcgcctcccaaatcagaaacggctcagccgatatcgggctgagctgcttaaaggtgcaatcatcttccctcacctgccgccccctgtacaatgaccccgttgtgctcgtcgcgccccccggccgaaaatcagcatcagggaaggcggctgaagtgaaagacctgttcggacaatatctgctcctgacccataaccatcctgactattgggatgatttgctccgtcaggtcagaatacaattccctttcgtcagaacgatgaaggtgacacagacgcatattacgaaacggtttattaaagaggggctgggtgtctcatttctgccgctgtcagctgtaaaggccgaactcgccgcaggcagcatgattgaaattccatgcgaattcgcccagataccgagcgcaggcgcgtacgccatcgcactacatgaaaatgaaaaaaagcaaacctttttagattttttatcacattttcatttttaggtgaaacaaatggagttctgtcccgtctaaataaaaaaacccgttctgatgaacgggtttccctggctgctagaatcttttcgcgcccaggtagcgaggcttccagtagctgttattcaggtcactggttgtgacgccgtcagaaccggcatggatgaacttgttgtttccgatgtacacacccatgtgtgaagggccggcctgatatgttgtaaagaagacgaagtcccctttcgacgggctggacacgctcttcattgagctccagtatcccgcagtgctggttcttccgacactcgtctgtttgttcagcaggtaccagataaatccgctgcagtcaaagccggaagtcgttgttccgccccatacatacggcgtgccgattaaagattgcgcatcagaaacaagcttgtttacattcaggctcgtctgtgcagcgttatagttagatgaagactgatttgatgaagatcccgttgacgttccggagtttgaaccggaagttgatccttttactttaagaacttgtccgatgcggatcaggtctgtttttaaaccgtttaaacttttcaattggtttacagacattttatatttattcgcaattttccaaaggctgtcgccctttacgactttatatgtagacgatgatgaattgctgccagagcttgaacctgaagatgatttaccgttgattgacagcgtctgtccgatgtaaatgatatccgattttaatttgttctcagatttaatggaattaattgacgttccgtattgatttgaaagtccccataatgtatcgcctttttttaccttaatcgtttgcgcagatgccgcacccgcaaacaaagtcgtccctaaaaccactgccgttgttgctgtaacaagttgctttttcatgttttcctccctgaatgattctatctattttataagtctcttttttaaagtttttatctgttttctattataaggttcaatttccactagaaatagacttgacttcccgtgacaaatttcttactaattcgtttttgtaaaaagtttttaagggtattaaatatttcaatttgatttcaaacgtgacgaaaaacgagccgttttgtcatgtttttttcctgtgatcctcgttttttggaaaaacaaagaaattcattttccaaattgacccttgtcaaaaaaatcctcgtcttttttgaaaaagtgaatgattttcaccttttccagaaaacataaccttacatcggaatttacatttctaacaatgtttcacctgaaatttacaggagggacaggcgctctttacaaacatcccctaccattagacgtacagacacgattaaaggaggacgatttgagaatgagtttatttaaacaggttcgatcaaaacttctgccggcggcagccgtatccgtgctgacagccggtctgattgcgggtgcggggcttcagcactctgatcaggctgcggcaaaaaaacagcctgagaaaaacgagatcagaaacgtcatcttcatgatcggagacggaatgggcgcgccatacatgaacgcctaccgttcggtcattaacaaaggaaagccttctgacggcatgaaactgacggcatttgaccccaatcttaccggcatgatgatgacttatcctgacgatcctgattccaatatcaccgattccgcggcggccggcacggcaatggccaccggcgtgaaaacgtataacgcggcgatcggggtcgataaaaaaggaaagcgggtaaaatccgtccttgaagaagcgaaacaaagaggcaaatcaaccggacttgtcgcgacttcagagattgcccacgcaacccctgcggcattcggagcccataacaaatccagaaaaaatatggatgaaatcgcgagcagctactttgatgaccgcatcaacggacaacagaaagtggatgtgctcctcggaggcggcaaatcaaactttatccgtaaagaccggaatataacgaaggatttcaaaaaagcgggatacagctatgttacatcaaaacaggagcttaaaaaggaccgcaataaaaaggttctcggcctgtttgccgatggcggactcgacaaagcgatcgaccgttcaaacgccgtcccttcattagaagacatgacaacggcagcaatcgacagactgaactcgaataaaaaagggtttttcttaatggtcgaaggcagccaaattgactgggccggacatgacaacgatatagtcggcgcaatgagcgaaatgaaggattttgaaaaagcgtataaagcagcgatcgcatttgccaaaaaggacaaacatacgcttgtcatcgctacggctgatcacacgaccggcggattgacaatcggagcgaacaacgataaaaactggcatgttgaaccggttcttgcagcgaaaaaaacgccggcatttatggctgaccaaatcaaagctggcaaatccgtatcttccgtgcttgcgcgttataccgacctgaaatggtcaaaagatgaaatcaaacagatcgaaacggctgcaaagcaggatgctgacaagggcgcctacaaagcgatcattaagctctttaatgcaaaaaccaacagcggctggacaaccggcgatcatacgggcgaagaagttcccgtttacgcatacggtccaggaaaagaatcatttgcggggcttttaaacaacacggatcaggccaaaaagatctttcacatcttaaaaagcggcaaataaaaaaggatgcggggtttccccgcatcccttcttcttttttagagatatctccgatgcactccttttccgtcatacgagaacatcacttctttatcttcgagaactgattcgatatgcacgctcctgccccacagctggtacagatacggcagcactttctccaaatatttcagatcaagctcaattccctcataccaatgtttaatataaagctcgttattcttcaaataatctccgtcattgacggtcagataaggaaatcccccgttcacccgcatgttcacgagctggtcgcgcacagccttccattccttgtcgatcactttatagtctctgccctgcttttggaataaatacaaatcctcgcgcagcacaagatctttcgtcaaataattgcggatgaatgaaatatccgattcaatttccctgacctcaaacattttctccctgccggaaccgggctttactcctgtttttttcatttcttctgtcgggttgtcgtagcgctcttcgatgtcttcaaaaattttcagccctaaataatacggattgattcccgtttttgacggctgaatgacgcctgcgttcagcttcgcaaactcgatcgcttcatccgaagtcaggtcaagctctcggataatccgctgatgccaataggatgcccagccttcgttcatgattttcgtttccagctgcggccagaaatacagcatttcttctctcatcatcgttaaaatatcacgctgccacggttcaagctcccgcgaatgctcttcgataaaaagcagaatatctttttccggccggggcgggaacggttttttcctttttttctttttaatctgcttcggcttatccatatcccataaatcatcgtacggcgatgacgcggtttcctcttcgtcctcctcctcatcatcgacgctccacagcagcttcggcctgacgagcgacggatcgatatgctcctgaatcgccagaatggcatctaaaaaggactccacttctttaatcccgtgaattctttcgtaatgcttaatccgctccgctgtagccgccatgctctcaaccatgtcccggttcgtattttgaaagcggcagttatttttgaaaaaatcacaatgcgcaagaacatgggcgacaattaatttattttggatcagcgaattgctgtccagcaaaaaagcgtagcaagggttggaattaatgacaagttcataaattttgctcaaaccgagatcataatggagtttcatcttgtggaattgtttgccgaagctccagtggctgaatctcgtcggcatgccgtacgccccgaatgtataaataatctcagccgggcaaatttcgtatctcatcgggtagaaatcaaggccgaatcccttcgcaatgtcggttatttcctcaattgcccgctgtaaaccttttgtctcctccgcgttcaaccgaatcccccctacttggacttatttataatgtatgacccctcctctcaaaagatgaaataacagacgggtttccgtctgaaaactttcggcacatccgccccgtttgctttatatgtaagtgggtaaaacacacaccacaccctaaaaaaaagaaaaaggagcgattctacttgaacacagcagacatgcttaccacgtatctcagcaaactgccgaatctgatcattgcactgctcgtcctgcttatcggctggggcattgcgaaaatcattgaaaaagccgtatacaaaggcctccaaaaaacaaaaatcgacgacagactgttcgccgaaaaaaagccggcgcgctattcctcggaaaaagtcatcagtaaaatcatttattttatcgcattaattatcgtttttattctattctttaacattctgcatctgacaaccgtggcttcgccttttgtcagcatgctgtcggcgataacggcggctgtgccgagcgttttaaaagccggtttgattctgctgttgggctgggcggccgcttcgcttttcagctatctcgtcaaaaaagcgggcatgaaactggctgaacacggctggctcagaaaatggaccatggtttctgaagaagcggagatgagcagatccgttacggccgcttcacgaatcgttttttatttcgtcttgctcttgttcctgccgggcgttttgtccgctctccagatcagcggagtatcagaaccgtttacaaatatgatccaaagcgttttgtcctttataccaaaattattcgccgcggcgctgattgtattaatcggctggcttgttgcccgtctcgtccgtgatattgtcacaaactttctggcgagtatcggcacggaaagacttgccgcacgtatggggctttctatttatctgaaagatacaagcctgtcggcaatcatcggaacgattgtctacgtgctgattttcattccggttgtcatttctgcgctggatcggcttgatgtagcaggcatttctgaaccggcgtccgcaatgctgaacacggtcttcacaatgcttcctaacatcatcatcggtattgtgctgatcatcgccggcatctggatcggaaaatgggtaaacagcattgtaacaggactcttgcaccgggccggcttcgactcacttcttggaaaaatgggctttgaacaggcggagcgcccgaaacttacgctttctcagacggtcggcatgattgcgcagatcatcatcgtcctgctctttacggcagaggcgctgcagcttgttcatctcgaatttctcgtcgtcatcgcgaccggcattatcgcttacctgcctaatgttctggccgctgtatttattctcggaatcgggcttttggccggacagctcgtcagcagactgcttgtcggcatgctgagcggaaaagaattcagattcctggcgccgcttgcgaaatatacaattatcactctctcaatctttatggcgctagatcagctcggcgtcgccgatacgatcgtaaatgccgcgtttattctcattctgggcggttttgcacttgccttcggactttcattcggtcttgggggaaaagagtttgcctcccgttatctcgcgaaattggatcgcaaaattgaaaaacatcaatcggcttctgacgatcgtaagccgccgatgtcttaattcaaaaaaaacgtgtgctcagaaggagcgcacgtttttttgagtttgaggggcaaattccttttttttcattttgaattcctttatgataaaatgtaacagaagtaaaatctcttttttcgaggtcattctatgaaattaacgaattacactgattattctttacgcgttttgatttttttggcttccagaccttccgaagaactttctaacataaaagaaatcgcagacacgtattccatctctaaaaaccaccttatgaaagtgatttaccgtctcggccagctcgggtatgtagaaacaatccgcggccgtggaggcggtattcgattaggaatgataccggaagacataaacattggcgaagtcgttcgaaatacagaagacgactttaacatcgtagaatgctttgactcccaaaaaaatctctgtatcatatctcccgcctgcaacttaaagaacctgctgtatgaagctctccaagcttatctggccgttttagacaaatatacgttgagggatctggtcaaaaataaagaggagattatgagactgctcaaaagctgaaggaatgtccgcattccttctttttttatgcccgcataagaaaaaaggactaattctcttaatatatgataaatgattgcagacaagtgccgatataaagattatcattactgatatcctcatcttgcggctgcaacgaatggggatagtaaaatcatcgcaggaaaagggagattcactatgaaaaaaaagttagcggtcggtttgactgcatctgcgattgtcgggtctgcattagctgtaacaccggcagaagcacaaacgattaaggtcaaaagcggagattcattatggaagcttgcccaaacctataatacaagcgtggatgccattacatcagcgaatcatttaaaatccagcgtgctttccatcgggcagacgctcaccatccctaacggcaaatcagattccggaagctcatcgtcaccttcaaagaacagcggcacatctaaaggtgtgtatacggttaaaagcggagactcgctctggctgatcgcatctgattttaaaatgtccgtgcaggaactgaaaaaactgaacggtctgacaagcgacttaatccgcgcgggacagaagctgcaagtgacagggaaagtttcctcaagcaccgatcagacaaaaaccgtgccgggcagcagctcaaacagcagcaaaaatcagtcatcatcttccgggacatataaagtcaaactcggcgattcactatggaagatcgcaaacagcgtccatatgaccattgcggaactcaaagttttaaacaacttaaaaacggatacgatctacgtcaaccaagtcttgaaaacaaaaggaacgtcttcttcgggaagtacgccgccaaaggacaattcaaaccaaaatcaaaaccagacgcaaacgtcctcttacacagtaaaaagcggcgattcgctctggaaaatcgcaaacgcatacaatatgacggttcagcaaatcagaagtatcaataaactgacgtcagacatgctgcgggtcggacaagtgcttaagctgacaaaaacgtcatcttccggctcttcgtctccgtcaactccgaaccaatccggagataaagggaaaaccactacatataccgtgaaaagcggggattctttatgggtgatcgcccaaaaattcaatgtaaccgcccagcagatccgtgagaaaaacaatctgaaaacagatgtgcttcagatcggacagaagctgacgattaccggacagcagacaaacccaacaccgaatcagtccggcggaacaggcggcacaggttcaacaagcgcgaagattaatgtaatgatcgatgccgcaaaagctcaactgggcgtaccgtatgtatggggcgggacaacgccgagaggctttgactgcagcggttttatttattacgttctcaataaggtcacttccgtatccagactttcagccgcaggctactggaatacgatgacatcagtaagccagccggcggtcggtgactttgtctttttctcaacttataaagccggcccttcccacgtcggcatttatctcggaaacggacagtttatcaatgccaacgattcaggtgtcgtcatttccagcatgaacaattcctattggaaacagcgctacctcggagcgaaacgcttcttctgatacagacaagctgcatagccgcatcaggctgtgcagctttttttacagtctgaaaatattaatgctgatcacatgttttgtcacgggatgaaaatacacttcagcacgggaagaaaacgtgtctttttttgtttttaccgtaacgcgaaacacgtctttcgtctgttcccggtttactttcgtacggcccatgtatgaataatcggtaagctcggctccctcgtattcacgttccagctgattccatgcgagctgctcccatttttcaactgatggatcaaggtgttctgtatgtcctttttcagcgatcgaggcgatgagaattccgcaaaacaataaggccagcgcaaatggaagggatttcattgttatgttctcctgagtcgtttttagtcaatcttagcgtgtccaaaaaaggggcggatatgcggttttattttatgtctccctcatattgctataccgcagttatacgggcaccaacttttcccccgttgcattccggcttcggcggcataaactaacggagaacttctcattgaaaggagaagcgtaagatggatcatgccgattatgataaagccttgtattacacacaccggtcccaatgggacaatttgttaattttgatggtacgtacgaaagacgatttgttatcaaagcgtattgagcactttctgcacgcgtatcatttcgaatatgatgatgcggtgcttgaaaaagagctgtattcccttctcgggtatattgatcatgcggcagaactcgcgtatgaagatcaattagccatgctgacataaaacaatcccggcgtcaaacgccgggatttcctgtgtttataaacatgttcagctcttccatcatgtctttcaggctgaccgccatatcctcagatacggtcttgcgctccatgtcaatgtgaatcggatctaaaatcagctgtttcggaataacatttgcatagacgccccgcatgaccgtccgcatattcgccagtgcgttcatgccgccttttcctccgcccgccgcagcaatgattgccaccggtttataggtccagtgttcgctgcttaaaaaatcaatggcgttttttaacgctccgctcatgccgctgtgatactcgggagataataagacgacggcagacgactttttcacaagccgtctcagctcttgcactgaaggcaattcattctgttcttcttcaccgttatatagcggcagtccgctttcgctcaagtcaataaaatcggtatgaaaccggtctctgatataagaagcggcaattctagtccgcccgttttttctcggggtgccgctgatcactaatatgctcatttattttaccgcctttccagaaatattatattttacggcatacaatgccgcttgcgtccgatcggaaagattcagctttgacagcaggttggacacatgggtcttcactgttttttcagaaataaacagagatgcggcaatttccttattgcttttccctttggctatttcttgaagaacatctttttcacgaggggtcagctgataatatttttccttattctgatcatcctgaaccatatgattgagcacgtgaggcacaatgtccgccgacagcctgtaacgtccggaatatacttcacggagcgttttcactaagtcatcgggctgggcgtctttcagctgatacgctttggcgccggcttttagggcgggaatgacatgctcccggtcagaatagctggtcaacacgactatgctgatgtcaggaaatcgttcagccgcaatgtttgccgcttcaatgccatccatatcaggcattgataagtccattaaaatgatgtccggccccgtcttttcagcttgctgaagcgcttcagcaccggtagacgcctcaccgacaacttcaatatcttcctgagtggcgaagaaatagcgcagtcctttgcggacaacgtgatgatcatcagcgatcacaattttcatcagtcagaccctcctatcccgaaaaacggaagccgaacggagacaatcgttccgccgccaagctcagattgcaatgtaaaacgggctccgattgcttcggcgcgcgctttcatgccggcaatgccgagcgacggcagtcccacatgcgcatcagtgctgaagccggctccatggtcgctaatggtaagctcagcgtaatccggctttttaacggcggaaatggtaacgaagttcgttcccgcatgctttttgcagttattcaaagcttcctgggcgatccgccatagcgcatgttcctgttcatccgtaagctccagttcatcttccatgtcacagacggcttccagaccgatgagagcggcatagcttttgatcgacgcatacagccctttcgttaagctttccggcctcagctgccaaatgagcgccctcatttctgttaacgcatcctgagagagctcctggatgaacgtaatcatctgccggagccgttcatcatctgtcaagcttttagcggcttttgccgttaagctgacagaaaacagcatctgattgacggaatcatgcagctcttgcgccagtctgcttcgttccatcaacaaggcgttctgctgttcaaattcagccagtttcatccgctggatcgccgttccgatttgaaacgcaaccgcttcaagaagatgcagttcttcttcgttgaaaaatgtcttttcacttgcagcgacattcagtaaaccgaatttccggccgccgtcttcaaggggaacggtcgcatgatgggtaatgccctccgtgtcgcggcagttcgtcgtctgttccgcaaattcaatccgtttacaattcataatgtttacagccttggtcaacccgccgttactgaatttggtcagacaatagcagtccccgctgcacattaatgcattgtcccgctgaccgagagccggcggtaaataagcggatgcggcgagcgtataggatccgtccggctcaatcagaaaaatccatcctgtctgcagcccggtcagactgagcagttcgcgcaggactttatcaagcgctcctttcatatcgtggctttggtttaatgtttccgcaatcgcttttaatgtttttaacgtttctaccgtcgttttcgtcaaactccctcactccggccaatcagaattatccatattatatcaattcttatctgcatattcctttgttttcagcatgattttttctcatactttcggatgaggcataaaaaaaaccgccggatgtcgcttccggcggtttgttgtttatttcgttttttccactatgctgtccaccgttttcatgacggcgtcagataatgctgcaagacgctgttcgctgtcttgtaaagaagtgcctttcactgcgaaatagaacttcactttcggctccgttcctgatggacgaaggcagaaccaagagccgtcttcaaggaaatatttcaggacgtttgacttcggaagatcaatattctcttcccgatgaccggcaaatacagtccgttttcctgttgaataatcctcagcttgcgtaatttgttttccggccatttgctttggcggatcatttcggaatgaagtcaggatagcggaaatctgttcggctccctgttttccttttaacgtcaatgacttcaagccttcacgataatatccgtattctttaaagatggagagcagcgcgtcataaagcgacatgccctgctttttataaaaagcgcatacttcgacggctaacagcgcagcctggatcgcatctttgtcacgggcgaaatctccgattaagtagccgtagctttcttcatacccgaactggaatgtgtattggccggatttttcatattctttgatcttttcaccgataaatttgaagcctgttaacgtgtcaaccgtatctaatccgaacgatgaagcgacggcgcggcccaattcgcttgtgacaatcgttttcatgacaacgccgttttccggaagggacccctgttttttcttctcggaaagcagatagtgcaataaaagcgcgcctgtctggttccccgtcagtaccgtatacttgccttcactgtttttcacggcaatgccgagacggtcggcatccgggtccgtagcgacgagaatatcggcattttgttcttctccgagcttaatcgcatattcgaatgccgcgtgctcttcagggtttggcgatttgacggttgaaaaatccgggtccggaagctcttgttcctttacgacagtgacgtttttgtaaccgagtgcttcaagaccgcggcgtaccggtttattcgccgtgccgtgcagcggagtgaacacaacgctgacgtccacttcttctgaaagctcgggatgaacggagatggaagtcagtttttcagtatatgatttatcaatttcttcaccgataatcttaattaaacctttttccttcagcgcctgttcatcttcaacttgaatcgttaattcattttctatggcattcacttcagcaatgacgatgtccgcttctttcggcggcagctgtgcgccgtcatcgccatacactttatatccgttatattcaggcgggttatggctggccgtcacgacgatacccgcataagcgttcagctttctcaccgcaaaagacagctcaggcgtcgggcggagctcatcaaatacgtatgtttgaatgccttgggaagcaagggttttggcagcttccatcgcaaactcaggggatttatgacgggagtcgtacgcgatcgcaacgcctctttttttcgcgtcctcgccatgtttggcgatatacgccgcgagtccggcggatgctttgcggaccgtgtaaatgttcattctgtttgtgcccggtccgatttctcctctcatgcctcctgttccgaactccagatttttgtagaaaaagtcttccagcagctgctcgtttccttctgcggccgccaataattttttcaattctgaatctaaatgttcggcctgattccagcgttcgtaactcttactccaactcatgttcgtcctcctataatttcagcttatgaccatattttaatatgaagcggctgtccgtgtcacttgataacttaactcaacgctttatgtaaaaagaagggcttatgccttttcggcacagccctccgattattattgttcgagcggaacaaccgcatcatgcagcagcgtgtttaaccactcggtgtgtttcgctttcgtttcatcatcccattggaatcggtcgctcatgtaatcaatcacagccgttttatacgttttcacccatttgatgtcgaagaacagtctgcccgttctgcggacgaagaaatcagcaggtgtcgcagccatctcttcttcaatgctgtaagccgcttccgccaaaatgtgaaccgggatctggcgttttgccgcttcgtctttcagaccttcaatgcggttgaagacattatcaacgttagagccgtatctgatggctaactgcttagcagtttcctgtgataaaccgattttcaagccgtcttttgtctttgcttccacaaatgactcgaagtttttagagccgccgacatgtcctccggaaatcggcatcgtcttcgttttacagccgccgaagtcctggccgccttcttcttttaaacggtcgcggacaagatcgacaatgtgctcagccatttttctataacccgtcagttttcctccggcgattgtaatcaggccggattgagatgtccagatttcatctttacgggagatctcagacggatcttttccttcttcgtgaatgagcggtctgaggccggcccagcttgattcaatatcgtcagccgtaatattcagttccgggaacatataattgatagagctgacgacataatcacgatcctgcacagtcatgcgcggatgctcaagtttttgtttgtaaaccgtatctgtcgtacctacatatgtttttccttcacgcggaatggcgaacaccatccggccgtccggcgtgtcaaagtacactgcctgcttaagcgggaatacggattggtcgaatacaagatggaccccttttgtatgctggagatgcttaccgtttttgctgtggtctttttctctcagctggtcaacccacggacctgtcgcattgacgatttttttggcataaattttgtattccttgcctgacagcaaatcttcaactaaaacgccgacaacttttcctttttcatacagcaactctttcactttagaatagttgacaggctctgcaccgaatttaacggcttctttcatgacttcaatcgtcagtctcgcatcgtccgtccggtactctacatagtagcctccgccttttaagccgtcttttttgacaagcggctctttctgcagtgtttcttttgcagacagcatgcttctgcgctctgcttttttcacccctgctaaatagtcatacacacgcagaccgatggaagtagagaatgaaccgaatgtgcctcctttatggaacggaagcagcatccattccggcgtcgtcacgtgcgggccgttttcatatacaatggcacgttccttaccgacttcagcgaccattttgacttcaaattgtttcagataacgcaagccgccgtggacaagctttgtagatcggcttgatgtgccagccgcaaaatcctgcatttcgctcaaagcgactttcattcctcttgaagcagcgtcaagcgccgtaccggcacctgtaatacctccgcctataataaacagatcgtatgtttttttagtcatgtcttccagcatatgatcccgttccaaacttgaaaattggtgattcatcattacgtttcctccttgttgtcacggtatagaaaaagagaccacaacagccaaagcgctgtcatcactttggtgctgtggtctctcctcatctcaggaccgttcctattaacttgttttcagtataccacaattttatcttatttaaaagccatagctgcatttactgcttttttccagccactgtacaattcttcgcgtttttcatcttccatatccggtttgaattgcttatccagattccattgatcagcgatttcagcgctgtccttccagtagccgacagcaattccggctaaatatgcggcaccgagcgccgtcgtttcattaatttgcggacgttcgaccggaacatcaagcaagtcgctttggaactgcataaggaaattattttttaccgctccgccgtctacacgcaatgttttcaaagagatgcctgaatcagcctccatggcgtcaagaacatctttcgtctgatatgcgagcgattcaatcgtagcacggataaaatgctccttcgtcgttccgcgtgtcaggccgaagactgagccgcgcacgtcactatcccagtacggtgtgcctaatccgacaaaagcaggcacgacataaacaccgtcagtggaatccacacgctctgcgtatgtctcgctttctttcgaatcctggaacatccgcatgccgtctctcagccattggatggcagaaccagcgacaaagatgcttccttccagcgcatactcaacttttccgtctaatccccaggcaattgtcgtcagcaggccgtgctctgaagtaatggctttttcaccggtattcatgagcataaagcagcctgtgccgtatgtgtttttccccatgccttcttcaaagcacgcctgaccgaacagcgctgactgctgatctcctgccgcccccgcaatcggaatatttttaccgaagaaatgataatcaaccgttttcgcgtatacatgagaagacggtttcacttcaggcagcatggatttcggcacgcctaaaatatcaagcagttcatcatcccattttaattcatgaatattaaacatcagcgttcttgaggcattggaataatccgttacgtgtgccgcgcctccggacattttccagatgagccatgaatcaatcgttccgaacagaagatttccgttttccgctttttcccgggcgccttctacattgtcaagaatccatttgacttttgttcctgagaaataagggtcgatcagaagccccgttttttgtctgaatgtatcactgtatcctttttcacgaagctcttcgcaaatgccggatgtttgtctggactgccatacaatcgcattgtatatcggctttccggtgtctttatcccatacgaccgtcgtttccctttggttcgtgatgccgattccggcaatttgatcagcgctgatcccggactcggagataacagtcgcgataacagcgagcaccgttccccagatttcgttcgcattgtgctccacccagcccggctgagggaaatgctgtgtgaattccttttgagcggaatgcacgatttttccttctttattaaaaagaatcgctcttgagcttgttgtgccttggtcaattgataaaatataggtctccatgatgccgctctcctttttaaatatatttagaatttgataatgttttctgtgattgagattttttggtgtaaatatagagtatgaaaagcacgataaccattataacgcttacaaaccaaaagctaggtgtcacattccctttaaacgcggcattgtaaaatacgccgccgaacgcaccgcccatgatcggaccgagaacgggaatccaggcatatctccaatttgacggcccttttttcggaatcggcagaaaggcgtgcgcgattctaggccccaaatcccgcgcagggttgatcgcatacccggtcgttcctccaagagaaattccgatggcaacgatgagaaatccgacaatcagcgggttcagcccttttgtaaattcattcgctccgattgccaaaatgccgagcacaagcacaaatgtaccaatgacttcacttatcatattcccaaatgtatgaggaatactcggtccggttgagaaaacgcccagtttagcggccggatcatccgtcgccttccaatggggcagataatgaaggtacacaataaccgcaccgataatggctccgatcatctgtcccgcaatataaacagggacgtctttccaaggaaaactgccttcaagcgcaaggcctatcgttaaagccggattcaagtgagcgccgctgatgccgccgacagcatatgccgccatggctacgcccagcccccagccaaatacaacaacaatccatccggattggtatgaaagcgatttctttaagttgactcccgcacaaacgccgccgccgaaaataataagcagcattgtaccgattacttctccccaaaatgctgtcatcatcattcctcctaaatgacaaaatagcaggtttgacagagttatagagaataaaaaacccacaacaaaccgctttacgctttattgcctttcgtaaagagctgttgtgggtctccgggtctccatcacatagtattaacctaggtctattgtaacaacgggtgtaagcggtgtcaatctttttttgtcatagaatgttcatatttagcccataaatcggtgtctgaagtcgtcacggccgtagcccctgcctgcagggcgttttcaacgtcctgctccgtgcggataaagccgccggcaaaaatcggtatccccgtcatctctttaatttcccggattaaagtcggaacgatgcccgggagaacctcgataaagtcgggcttatgcttaccgacgaattccatactcttttccacggcgcttgtatccaagagaaacagacgctggatcgcatatattttcttttgtttcgctttggcgatgaccgcggatctcgttgaaatgatgccggcaggccggatgtcctgacaaatgaactccgcaccgtattcatcatgtttaatgccgtgaattaaatcgacgtgaatcatcaggtgttttccgtgttttttcgcttcattcacgacaccttttaattgaccgaggtgaatatctaaaatgacgccgtataagaacggactttctaaaaatgcatcgaattgcttcatgttccggatagccggtaaaatctgctggttgtgaaaactcatgttttactcctttacattaaaaatcaatgctcagcacgctttccttgacggtcgaaatgatgaaagaaagctcttcgtcagtcaggcaaaaaggcggtgacagctgaatgacattattatatcccgcaacagtatcgccatttttcccgacaagcaggccttttttcttacacgaggtgatgacgtgctgcacagcggcggcatcagcgggttccttcgtgattttgtcctttacaagctcgatgcctgtgagaaggccctttccgcgtatatctccgaccgcgggatgttctctgagcggctgaagctcccggagcagcctttccccaagctcccgggaacgggcgatcagattttcgtcctccatcaattgcaggtttttcaaagcgagggcgcaggctgccggattgcctccgaatgtattcacgtgccggaagcggccgtacggctcaccgcccgagtatgcctcaaaaatctcccgtttcaccgccgtcgccgacagcggcaggtaggcgctcgtgatgccttttgccattgtgacgatgtccggcgaaacgccgtaatgctgaaatccgaacggctctcccgtgcggccgaaaccgcaaatgacttcatcactgatcagcagcgcgccgtggcggcggcaaatttcctctaccttcgccatatacccgtccggaggcatcagtatccctccgcctgtaataatcggttccataataacgccggcaatcgtttcgcttaactcccacgtcatgatccggtcgatttcttgtgcgctttccaatgtgtcagcatcggcgggattccgatagagatcaggcggcgcggcatgcaaaaatccttgtgagagcggctcgtatttgtattttctctgcgcctggccggtagcggcgagcgcccccatcgtattgccgtgatagcctctgtatcgggagatgaatttgaagcggctgtgatcgccgttttcaatgtggtattggcgggcaattttgaacgcggtttcatttgcttccgatccgctgttggaaaagaagattacataatcgccgccgagccactcattcagtttttccgcaagttcaatcgcgggtttatggctttgggtcagcggataataaggaagctctttcaattggctgtaggccgcgtcagcaagttcctttctcccgtatccgatattgacgcaccacagtcctgacatgccgtccaaataccgcctgccgtcaatatccgtaacccaggcgccttcccctttttggacgattatgctgtcatccggctccgcccctttcatcgcgtgccaaatcagctctttatccttttgtttgagtgactgatttttttgtacatgttccacaccgctcatctccctttcaatatcattgcactgtatcgaaagctgcccggcttctgacgccgattttcttggtgaagatttcctcttaataagaatataaaggcgcagcacgggcgagtcaacaaagcggcggcaaataaaaaaacgctttctcccagaaagcgaaagggctacaagagcatatcccgaaacggggtacggtgcaagtgtttttataaaaaaacccgccccctaagcggagcgggctttctttatttaagatgcgtaatccggtaaatgtctttgcgccggtctttcagctggcgcacggttccgttttcacgctgccttctcaaaatttcaaggtcgacgtccccgataacgaccatttcgatattcggattcgtttcaccgacgattccgtctctggcgaattcaaaatcagacggcgcaaaaatggctgactgagcgtactgaatatccatattttctgtttgcggcaggtttccgaccgtgcctgagatgacggtgtaaatctgattttcaaccgcccgcgcctgagagcagtaccttacgcgcaagtagccttggcggtcttcagtacagaacggcgtaaagataattttcgccccttgatccgcggcaattctcgcaagctccggaaactcgatatcgtagcagatctgaatggcgatctttccgcagtccgtatcaaatacgcgcaccctgtctccggcgctgatgccccaccatttccgttcattcggcgtaatgtgaagcttatattgtttttcaatcgtgccgtcacgtctgaataagtaggcgatattataaattttcccctcttcttcaacgaagtgggaaccgccgataatgttgacattgtatttcaccgcgagatctgtaaagaggctgatatagtcctcggtatattcggtaatcctctgaatggccagactcggagaacgctcctcaaggaaagacatcagctgcgtcgtgaaaatctccgggaacaccgcgaaatcagatctcgcatcggaagccacgtccacataatattcaacttgattggcaaattcctcgaaggaataaatctttttcatttcatattgaatgacgcaaatacgcaccggaaatgccgatttgtaatagcgcttcgactgcggcaggtaatcgacattgttccattccattaatgtcgcatatttaatggacgcggtgtcatccggaagataattcggattaatccgcataagcgtaaatccgttcatcagctggaaggaaagcaccggatcataaatctgatggcgcgtcacctgttcaacataggctctcgccgtcatttcttccgcatacttatggtaattcggaatccgtccgccgataatgatacttttcagatttaatcgtctcgccagatcttttctcgcttcatacagccgatgtccgatcttcatccgtctgtatgccggatggaccatcacttcaatcccgtacaagttcagcccgtccgggttatggttcgtgatataaccgtcgtctgtaatgtcctgccatgtgtggcggtcatcatattcatcgaaattgatgatcaggctggagcatgaaccgataatttccccttcatactccgcgcaaaactgaccttccggaaaatgcgcgaggtggctgattaaatgctcaggctcccaaggttccatccccgggaaacaatctttttgcagctcaataattttgttgatatctttttcttccatattccgtatgaccattttcttttcaaaacgggtcagatcaagtttctcagacaatgctgtttccccctgccggttcgttttgattgttcaatcgctgtaaaagtaattcaagttccatttccgccattgattccagtctgtgatcgtattcttcaaacaacagagcgcccgttaccttattcggcacgatgacacatttcatgccggcgcgtttggcggcgattgagccgttgacagaatcctcaaaggcaaggcattcagacggttcaacgcctaaatgttccgccgctttcagataaagctccggattcggtttcacttcctctacgtcgtcagcggtctgaatcacttcaaattcatcaaacagacctaattccttcagatgacccgacacccatttgaaatctgagcttgaagcgagccccaccttcaatcctaattcttttgccgcggctaaataagcctcaaccccgggacgcgccgtttccgtcttcatccgctgttcgaagcgcgcgcgcctgatcgccgtcagttcgtcatgatcaagctttcttcccagctgctcctctaaataggcgaacggcttaaaccccgcagccgttccgatcacctttccccagacggataaaggcaatgtcgatccgtgttcttcaaacatttcctgcagcacttcatattcgtgggtttctgtatctaaaattaacccgtcaaaatcaaagattaatgcttttatcactgtttacagctcctttagctaatcgtactgacttatgtatacactataccttgaatgtctttcgcgttcaaaaagtaacattcggacggaaagaagagcctgcattcagtgcaagctctcttcatccgttactgtgtgttttggctggaaatattagaaagagctgctcccgcagactcatttgaacgctgatcgaccgctaagtctccaagcgcaacgatcccgaccagatgattttgatcgacaatgggaaggcggcggatttggtgttgggccatcagctgtgacgcctcttcaagactcatctccggatttccggataccactttagaagacatcacgtgtgaaacaggtgtttggccgtcacggccttgagccgttgttctcaatgcgatatcacggtctgtcagcattccttttaactctcctccgtcaacgacgggaatcgctccgacattatgctgatgcatcagcgcagccgcttcctgaatcgtttggttaggagaaacggtagctacgtgggtagtcattgattgtttgattgaactcattgtaaagcacccctttcgacatttattatgctcgggggtttgtctcattataaagggagttagaggaaagaaattgtggtatcatgtcaaagaagcaaaaaaagagcctgtaaaaaggctcttttcatccgtcagatcagccttctgtaaccgcaggcttctgatccggcccctgtctgaaaatcatcataagtaaacggaaaattcatcccgcaatcattcagcaaagcgcaatttttattaaacagcgcccgttctttcgcatcatatacccggtgctgctttgacagcatgctatgtaccgtttgcagacaagccataatttgaaacgcttcctttaaagttccttggtaaagttggttttgtaaagataatacgcccctttttttaaagcgctgaatttccagttcggggaaataaagaggaaagacattttggaacaattcagaggaaagctcttgtattacgctttcttgtccgtcagtcgctgcgttcacaattctcacatcaatcacctttcttgccatgtgaatatccttaatctttatcaagaatagcatagaaaaaaacgcgaaagctaaggtaagtgtttcctattgaaacagccgctttccgcttgaaaaggagctttatgatatgaaacaaaatgaccgcgggctggagcttctgattacggaaaaacacgccggacaatggctgttttctgtcctgaaatcagaatttcaggcgtcaaaacccgtgataactgaatggatgaaccaagaaagcattcaagtaaatcgaacatctcccaaaaacaacatcatactgaaaaccggagaccgcctattcattgatcttcaggaaaaaacggactctacggtggttccggaatatggagaagcggaaattttatttgaggacagtcatatgctgattgcaaataagccggcggggatgccgactcatccgaatgaagagggtcagaccggaaccctcagcaacctgatcgcttatcattttcaaatcaatggcgaacaggcgaaagtgcgccacgttcaccgtcttgaccgggacacgtcaggtgcggtcgttttcgctaaacatcggctggctcatgcaatccttgaccgtcagctcgaaaccaaaacattaaaacgcacctatatcgccgcggcggaggggaaagtgaagccgaaaaaaggcacggttgattctccgatcggccgtgacaggtcacattccgtcagaaggcgcgtctcacccggcggacaagccgccgtcacccattacaaagtgaaaggctatcatcccggcgcacagctttcactggttgagcttgaattggaaaccggaagaacacatcaaatcagggtgcatatggcaagcatcggccatccgttagcgggagatgagctgtacggcggaagccgggcgctgtttcacagacaggcgcttcacgcaaaaaaggtcagtgtcgtccatccgatctccggagaagaaattgttgccgaagcgccgatgccggctgatctggcacactttgccgaaacgtatttctcttaaaccgggtcggcatatataatgtatcgtttcggcgcatttccgatataagaaaacgggtagcaagtggtcaggatcagttcctcccgctcgtgctgaagggtgatgacggacgtatcatcccggctgacgatttttgtatgcctgattttataagaaaacgtgccgtaagacagaatcacgttcagtctgtctccttttttcagttcgccggtccggcggaacaccgtgtccctgtggccggataatacaatttggccgtgttcatccggataatagctgtctttgtaatgtccaacgccttttgctaaatcatctgcgtcagtcccttccacaatcgggaggtcagcgtcgattttagggatttctaaaataccgcttgcttcacctgttttggggtgaaattcttttttgcgctgcgccaaagcggctctattcgtttctttctttgccagaacgggttcagccgctttttttgcttcctcaagcgattggtttgttttcatatgtgaatcgacgatcttccagcttccataacatgtgataatgacaccgatgatgatgacaagaagcggaatgtgtttcagcttgttcatggtgtgcgggttctccttttcattctgtacagccaaaatacgccggcgcccgtaatcagcatgccggccagcgccgtctgatggctgcccgctgaagtatcaggcaatgggcggcctttttgtgtgccgctttcagtctgttttgtgctttgttccagatttggagccggctcagcgtgggtttcaggaattggttgcacggtgtctgaagctgtttcttctatgacaggacgttcaggttttttggtgtgatcaggctgttctgccccagcaggtttatcttctttagctggtttttccgccggatcgggtttttctccgttatcaggtttgctgcctccgggtgtttcctctctccccggcgggtttccggtgtcatcaggtgattcggttcctgatgccgtgcggatgcggccctccgcttgataagtaatcggagctgaaaagcttttgacatagtctactgtcgcttccaaatcctccggccccgtcaccggatgtttcccaagtttcccgattgggccgtattttgccccggctgcgtttgccataaaatcattgactgttaatgtatataccttttcgggctgtatgtctgtcccgtccgccattttcatatcaaccgcttttccggtttccgggttccatgtataagaaaatccgctgatgctgtaatccgggccgtaagccggggaaatttgcgcattgatgatgtctcgcagatctttccctttgatttcaagcttcgtcagtacattgccgaacggctgtatattataaagatctccccatgtgatcggccctttttttatgccgtcccggatgccgccgccattcattagcgcaaaatcggatttcatcttcgctttcataccgtcggcaatcagatttccgagtgccgtgtccccgtcatttgaatagccgcccgttatttcatgggccgcttccccgaccacttcgctgacaatcggtttcactttctcttcatatttgcttaatatgcttgccgctgccgggtcaggcttaattttactttgatcgatgtattggatttccgctgatttttttacgatatccttcgactttttatcaagttcgagatcggcgattccgattgcttttccatattcaaatgcctgcacgatcagcttcccgttgacttccccgtttacgactttgtgattgtgcgcggcgaaaatcacgtcaatctccgagtctgtcccgtcggccagctttgcggattctcccgtgatcgctgtgccattttgttcagcagacatatgggcaagcactgcgattgctttaattcctttcttcttcaggtcggcggcggcttcatttacggcctttacctcatcggtaaacgtgatatttttgattccgtccggaatgaccatgcctgctgccgatcttgttacaaccccgataaaagcgaccggaattccggaaacgtatttgatttcatacggcggcagaaaggactctcctgatttcagtttacagttggcgcaaacgagcgggaaattttggccgtcataaccgcttgtccccttaccgtccggatgatctcctccattgatgatccgcatcagctcatttgttccttcatcgaattcatggttgccgacagttccgacatcaaaaccgatgtcttccatcagttcaactgtcggttcatcttgaaaaagggctgacacaggggaactgcccccgatcatatcgcccgcatgcaccacgagggcgttttctttctcggctttcgcctttttaatatacgccgcagcgtagtccatccggccgaaggtgccgtccggtttaccgtctccgttaaggtccagctcatattgctgatcaatttttccgtgcagatcattcatgctgatgattctgagcgggacacggccggggtcttctgtctgctggtctttatctgccttatccgttccagattcattcagtgatccggcttgtccgatagcttccgcatcgtttacgctgaaaatcataaaacacaccgccagcagacagaaccactgacgcatacacctttttttcttcatacatttccccccttgtcttctaagaaatacgttagcttattttcttaaaaatcacatcacttttttgtaaagattgtcttcgctggcgcaaaatagtaaataatccccatgtaacgaattaggtcttgatgtataacggatcggctttcttcacatcttaatgatgatttgacatgaaggaggaatacaaccagtggaacagcagcagaatcagcagcagccgccagtaaatcaggggatgccgggttcaccgcaagtaaatcacggaggacatgagcttttcgatatgcatgaagtactggccggaacagtcggcgttttggatcaatttatgatgctcagacaatttatacaggatcagcagctggccgatatccttgatcgccagtatcaattcattctcggactctataatctgacggcagaatgctttaagaccggtcaaaagccttctcaggaaacttcgacatatatgatgaaggaacagaaccaagccgtgtacggtataaaaccgacacagccgaaaaaaccgaatcaatcattaagtgatgtcaaagatctcgggataagcggccatatgctcggcctgattaaagcacaagcttctctcttgacgatgagctcgcttgaaatgaccaatcctgtgacaagaagagtgctctccgctcaaattcagcaatacgttgaaatggcttatgaaatcttcttataccaaaacaaacacggttattatcaggttcctcagctcaatgcacaagatatgcagaccatgctgaattcctttgcgccggcgcaagggcagccgcagatgcctccgactaaaggccaaacgggacagcagcagcaaaacctgcattgattaagaaacggcgttggatacctgtctctccaatgccgttttctttttttcatatgcttttgtgaaatcatgttcaaagcgtttcaggctttcttttgtagccgcttcaaagcctttttcaaaatcctgtgtttcggctgttttgttaataatggttaaaataatgccttctccgaatgtatcggttaaatcctttatcatataaaagctttgcaaatacacatccgtctcatattccatacgcgatttctgccattttcggtcggtcgttaattgatcaaacggcacgacggaaaatgtaatcggatcaatgactacatcataatgcgcgacccactcgctcagcccctcatgaaaccaaagcggaaatacagacgtagccgtccccatttgacgtgttttttgatgaaacgcatagtgcgtatattcatgtataatcaattgcttatacataaaaacagccagctcatcttttttcaaaagctgttttttctcttcaggcaacagccctatcatctgctcctgctctgaataaaaaccgactacattttttaaccctgaatattgctcaatttcagcttcatccgcaaagaaaatgagttcaagaggcgctgttcctttatagccgacaatgatttggctgattcgcttggcgtagtctagcgtaagcttggtcagatccaagagcggcttttcatccgccgtatagtaaatcgctgtatgtttgtaaatttctttattcatgtgttcagtcacttgttccttcgtcggaacagagcggctgttttggcctgacaggacgtacatcatacttactgaaacggctgaactgacagccaatatgacaaggactccgcacaggatcagagtgaatgccgcccgtttccccatgccgtcacgcaaacaagctccctccccgatccttcaattttcatctcattctttactttatgcgccggaaggtttggccgtgacggcagataaaataaaaaagccgcagcaaatgcggctttttcaaattcatttatttattgggatttgggaatacacgctgcaccatttgaccgaattcatcaaacagaccggatacagggtggccgtttttgattcgttttccgtagccttgcatacgttcaacgaaatccgggtttgctgatacatatactgtccggacatgcttatcggctgatttcactttatcggtaatcttttgttttaaatggttggcaatggcgcctttttgcccatttgtcaaaacaacggcaacataagcgctgtttccggcaacgatcacagttgcatttttaacttctttcaggtcagtcaccttgtctgcggctttatcagctactctcaggttacggttgttattatgatcagtagtgttttggttatgacggttcactgtattcatatttgtcgcaccgtcattaggcgtgttgcggtaatttacattctgggtacggttgtcatttcgttttccttctccctggttccccatgctgcaccctgcggtaatcagcatcggcagaagaagggcagaaataactgcttgtttttttatcatgtgaattcctcctttctcactttacatataggtttttctattcggcgggatttatgcacgccgtttgctttgcgcggcttggataaatttctgaaggaaaggaaaagataagcgtaatcaattgaatgaggagggatttaacttgttcagacaaaaaaaaggcatcagcccgacagcgctgctgatcggatcatcacttttgatcgcagctttatcaccggaaatccgccgcaaaatcaccggaatggtttcaggccaaatgcagcataaggatgacgctcattccatgcagcctgctgatctgattaaacaggctttcggcggggaatccggcggccagcagcatacagacaaagcccggcactcacaaaacggctccatgcagcctgccgagctgatcaaacaggctttcggcggggaatccggcggccagcagcatgagcagacttcccgcaatcactccggcgcatcatcttcgtctcatgaacacagccggagccatacagacggacagacagaccgcagaaaagaaacttcggcaaagcctcactatacggagccgattcactttgaagaaagcgcggtaaatgttttaaatgacagcaccgtgatgaatatgctggaagaaatcgaacccggaaatcaataaaaaaacccacgaatccttgtatagtaaggattcgtgggttctttaatcccgccggttttggactcggtgagctaaaaaatccttcattcgttaacaattgtcacaacaggcatcttgtttaaccgtaaggctccatccatcatccaagctataaattggtcttgatattagtcaaacgatagatcacaaacgacatctaacaacacattggcacctgctgcaaggtcatgatctttcgtgtactctttagggttatggctgataccctctacacttggaacaaaaatcatagccgttggacagatgcaggccatcatttgtgcgtcgtgcccagctccggaggtcatccgtttcgattccagccctcgtttatttgcagcccgctcaatcaattcaacgatatttttatcaaataccacgggattaaaacggactaattgttcagatgtaatagatgcgctttcagactctaccaaatctttcaggtaattggctagtgccaattcttcttgaggtctcttttcgtccggatcacataaatcaactgtaaatgtcgctaatgacggaattacattgatagcatttggctcaaaacctagtgattaatactgagggagacactgatagtctggggaacagacaattaatgcagcggcaaacgtctttcttctcactaaaaaaagccttaacttccgggtgaagttaaggctttttaagatcgagaattttatttttatgagaccagccatgcagtgtggctgcacaacaaacttatgtgccaatggcaggctttagttaagcttcttcagcttcaatgacgattgaggaatcattgtaaaccgaggtatcggtttccttcgtcattttacttgttaacagtcccgcggtcatgctgccgctgacatttaaggcagtgcgccccatgtcaattaacggctcaattgaaatgagcagaccggcaagcgcaacaggcatgtttaaagcggataagacgagaagagccgcaaatgtcgcgccgcctcctacgcctgctacaccgaatgaactgattgccactatcgcgatgacggaaatgataaatcccggttcaaacggattttgccccaccgtcggcgcaatcatcatcgcaagcatcgccgggtaaatgccggcacagccgttttgtccgatcgataagccgaatgaacctgcgaaattcgcaattccttccggtacgcccatgcttttttgcgttttaatattgagcggcaaagcccctgcgcttgaacgggacgtaaaggcaaacaccatgaccggaaatgcttttttcacatatgtgaccggatttaaaccgctgaacgtaatcagcagcaagtgaatgataaacatgacgataagcgcggcgtatgaagcgataacaaacatgcccaatttcacaatgctgtctatgtcgcttgtcgcgatcgtttttgtcataatcgccaataccccgtaaggcgtcagccttaaaattaatgtaacgactcgcataataatcgcgtaaaccgcatcgacaattccgctgaatgtcgcagcgtgctccggctgcttccgtttcactccgaggaaagcgatgccgagaaaagcggcgaaaataacgactccgatggtggaagtcggtctgccccccgtgaaatcaagaaatggattcgccggcagcagttcaacgatttgctgaggcagcgttttagccgtcatatcctcagatttttgctgcagctcctgtcctcttgataactcagtgctcccttggtcgatatgaacggccttcagatcaaaggaaagcgccgaaacaattccgactgccgcggcaattgctgtcgtggcgattaaaattccgatgatcaggccgctgatttttccgatgttatgggtcagcttcagtttcgtaaatgcgccgagaatggaaataaagacgagcggcatgacgatcatctgaagcaatttgacataaccgccgccggcgatattaaaccaatcggccgtttgtgtaacgatatgtgaagccggcccgtaaatcaattgcagtgcaaaaccgaatacaatgcctaatccgagcgcggtaaagacacgtttagaaaaggaaacgtgttttttttgcatcacaaacagacctgctataagcaaaagcattatgaaaacatgtaagacaacaaataaattctccaaaacaggtaaacactcccttgttcattatcctttaacactatattatatcaattccgatcggtcaagtaagaattgacaatatatgtatttttatagacttttctcttttctttccaccctttctttagtaacttatataagggtgattgttatgctgaaggaactgtttcttaatttgacgattttaatcacatttaattatctcttcacccttctttttaaagagtcgctttcgcataaagaagaccgtccgatgtttcaattactgaaggggacggcctgcgggcttttaggggtttttctgattgctttcggcttttcttactccgattccatcattgatctcagaaatatccccattattattgccgctctttacggaggctgggtgtctacggcagctgcctttatgattatcgtcgcaggccggatactgatcaatttcaatgccagcgccattttttccatcgtcgcagtcgggatgattgcgattctttctgtggccgtcctcagaggaaaaaagccggatcgcaaaaaggcgttcgttatgctgcttttctcaaacgttattttcaccttgacgatgctgttacttatgcctgaacagcagcctgccggggccctcgtttattattggctcatttccaccgtgggcggaatgctgtcactgtatatcatcaaacacgaagccgacgcccgccttttattcaagcaatacaagtttcaagcgaattatgattttctgacgggaatttttaataagagaaaatttgaggaagtctcgcgcgttctttacgaccgggcgtctcaatccgcctcatctcagctcgcgcttatttattttgatattgatcactttaaacagatcaatgatcaatacggccattatgaaggcgatcaagtgctgaaggaactgggggcgcggctgaggttcttaatcagcggctctgatccgtcagcccggatcggcggcgaagaatttgccgtgcttataccgaattgcacatataaaaaagggcttcacctcgcagaagaaatcagacaggctattgacgggaacccgattcttttaacgagcggagatacaattcccgtgaccgtttccctcggcatcgcgcattatccgacaaatacggcggatccgcagacattgcctctgatcgcagaccggctgctgtacaaagcaaaaacatcgggacgcaaccaagtatgcagcactgaaaaaaaagaatgaccgccgcaaggggaatcattctttcttttcagtgagaacgctgctgcccggcaggaaaacaggaaccaggctgccctgatattctttttcaataaacgccgcggtatcatctgattgatacaaagacaggagtgttcgcatccgctcatcatctttatcttcagctctgacggcgatcagatggagatacgcttccttcatctgcgccgatcggatcaatgcgtccttctccgcatgaaatcctgcttttttcgcgtcactttgactgagaactgctgcgtcagcatgttccgccgcttgaaatgcgttcttttttgtttccgtttttaagatcagatgtttcgggttgtccttgatcatatctgctgaacccgtcccgttgaatccttttttcaatgtaatcagtccggcctcctgcatgagaaagagcgctctgtcgaaggccgccgcttcgtcaggcacggcaatgaccgcgccgtccggtatatcctccagctgtttatactgcttggaatacaccccgatcgacgccgcatatgtcgttcctaaaggagccagcttatttttcacattaggcggcagggatttaaaataagaaacggtttgaaacgcattggcatcgagatctccgccggcaagtgccaaatcagcctccgcataatccgaaaacgctgccaatgaaagattcaaccctttctctcttgctttttttgcgacaaaatcccagatcatttgatcagattcattgattccgatagtaattgtccgattccccgcgggggaatggcatgaagtaagtgacatgatcacgatgaagagaaacagactgtttataagccgcaggttcaagataacctactccctatctattgttatgtgcaaaagctgcaccatgcattcgggctatgattatgttaacaataccgatttaaaaaagggttgtcaattgcttccttcacagggtaaaaagcggcttttaccagctgaaaatgtgctgttcagtctcagatcggctttccccaccagagtgttccgccttaaataatgttatttcaaaaaaagttacatttagcagttgttttttctccggattactggtagagtaaaggtaattatttttgttcgaactatctttaagaagaaagttttgtaagagttttcgtcttggaagtttgttttagagcaagaatagtgaatttaagcgttatgtcgctttaggaggaaatttcatgttagaaggtaaagtaaaatggttcaactctgaaaaaggattcggattcatcgaagtagaaggtcaagacgatgtattcgttcacttctctgctattcaaggcgaaggcttcaaaactttagaagaaggccaatctgtttctttcgaaatcgttgaaggaaaccgcggaccacaagctgctaacgtaacaaaagcataaatgtcttaaaaaacctgccggtgtacgccggcaggtttttttaatttaaaagctgttttgcaaaggcaaaacagctttttatatcaggtagcaatatcccgttttaagaagacgccgaatgcgagcgccataaaaatgatgaagtaaatcacaagcatcacaaccgaaaatgtcatcgtcatgccctctactaaaggagtcccgttcatatattgcgataaatccgtattggcaaataaaatatattttgcccattcaaatttcgcagcgagaaatacagtcgccgtgcttcccataaccaatagaaaaatagagaatccgaccgctaacgaactgttccggaatactgcagacagcataaacgccatcgtcgcaagcataaaggccgagacagattcatatacgtatgttttcgccagaaatgcgatgatattttgctcaaaaacttgtccgtctttgtatacgagatgaacattagcggctgtgtcgccgcttgtgccgaaaaagagtaatcccaacagagcggagccggcaaataaaattacaagcataagcagcccgaacagcagcaccgtcatatatttagaaagcaaaatctgaaaacggctgagcgggcggatggccagaagcttgatcgtcccccagttgaactcattcgccacgatgcctgcggcaatgatgatcgtaaacaagccggtcaaaacagtcatcatcgcagaatcagctacgtatgaccatactgtgtaccctgtatctttcgggatattatgatcaatgcgatattcatttatcgcgatattctgtttcagattatcaatgagagtctgatttccggtttccttcatctgctgtttcatttctttgttttcagcctggagctcttgtttccaattcggattggcttcattggaagtaaagtggtttgacagaagcgcaaagcctatcatcgcaacgcctaaaatcacaatcattgcccacgtgccgacacggctgaaaattttaatccattcattatagatcaggttaaacatattgaacctcctctttcgttcccccggtaatttccaagaaacggtcttctaaagattttgtgacgattttcacttcatataagcggacattttcacggacgagaagtgaaatcacatcaggcacttcctgttttgacagcttgatctcaaagccgtttgtcttcttcacacagtcaaattgagtcaggacggcaagtgcctcttctctttgttcaatatggaagaagtatgtatctttatcctcttttccttcatcccttaccttttgtatatcgacaagctcccccttttgcagaatgccgattcgatcgcacattaactccatttctgacagcagatggcttgagacgatgaccgccatccctttttcacgtgtcagctttttcaggtggtccctgatttccctgatgcctgcgggatcaaggccgtttgtcggttcatccagaatcagaaccttaggattatgcagcaggctttgggcaaggccgaggcgctgtctcatcccaagagaataggtttttactttgtcatgtattctgtcctgtaatccgacgagctcgatgacctcatctattttttctttcgtaacgccttttaccatccttgcgtactgctgtaagtttttataaccgctcaggaatttgtacagttccgggttttccacgatggctccgatgtgcctgaccgcttttgaatagtttttcgtaatggattctccgcagattacgatgtctccatgagacagtttcattaatccgaccatcattctgatcgtagtggtttttcccgctccgttcggccctaaaaacccaaatacttcgcccgcttggacggaaaagctcagatcatgaataatcgttcgtccttttatcgttttctttacctgttgcagttccaataccgtttccaattagaatcccccttctttttcgtgcttctgcatcacggttttataccattgaagcacggacattccttcctgttcgcgaatttcttcgacctcgcgctgttcagcgattttcccttttctgaacaccatcacttcgtctaacagcgtctcaatctcatcgatctcatgtgtggcgatgactacgatctgactgtcaaaatcaatataagatacgagactgttgacaatcgattccctgaccgcaggatccaggccggaaaacggctcatccagcagaataacggatgcttttcttgacagggccaggacgattttcagcctgccccggctgcctttggacagctcttttatcttctgctccgctgaaagattcatttccgataataggccgtgtgctttttccagctgaaaatccgggaactgtgaatgataaaatgtgagcatatcaccgacagtcgtccgggcgaaaaacatatcatgttcggttaaataagccgtgcgaaaaagcatgttccggcttacggcacggcctccgatccggacggttcccgcggtcgggaacgcaagcccggcaagcattttcagcgttgtggatttaccgcttccgttcggccctaatattccgtagatcttacccggagacaatgaaaatgagacatcactgaccgcgagcctgcggccgtatttttttgttacgtgttcaaaatcaagattcatcgtttgcttcctccgcatattgtttgatcccgtcgagcatttcttgagcagatagccccagctccgccatttcctgaataaagcgtttgaatacgtcttttgtcagccggtctttcagctctgctttcagatcaggtctttccgctataaaggttccctgtcctcttttcgtttccacgatccccagcctttccatttcactgtatgttctttgtatcgtattcggattcactttcatctgtaaggccatctctctaacggacggcaatttatctcccggtaaaagctcacttcggatcagccggtaatatacacggtcggcaatctgcagataaatcggcttagatgactgaaattcatgctccatcattacacctcaaccttgcgattcagcagcatagaggccagcgcgagacaaaccgccgaaaacacgatcacggcaaggaagctgaaaagcgagaagtggacggccgtcagttccatcttccagccggccaattttgtatagtgaaaatcaaaatccgcatacacttttaccggccataaatgatgctgagatgaagtgaaaggcgtcatgattttatcgtcaatataagaccatactgcggcaagcacgatgcagatcacccaacggaggatgggaaaatgttttaacgagtgaaaaacagtccaaaatacggctacgatcacagataagtacgctgaactgatcagcagataagcattcagtccggtcattgtgccggcaaggggaacgggctgttcaagggctccttttgcagaaagcatccggtacatccaaatgccgtagccggtcagcgccagctgtccgataaactgatacagcagtgaggccgtcagcttcgaagccagcagataaaacccgccattcggattgtaaagccacagctgatttttcccttccttatggaggtgatagtacataaaaagcggcgccacaagaaattgaaaaaaccccattgccgcaaaaaagccgaaaatgacgagcggttctttctgccgggcagcgattatgtgggctgtaagcgcccagcaaatcatgacgcaaagccaaactgcgagccagacccatgaaaccttcgcatcttttttcagcaaacctaaaaacgatgtcattctttttctctccattcgaatccagtgtatgagtaacatagtacactagatcatagtgaatgacaatatcttcaataaaaaaaggcaaatccgctcttacgcagatttgccttttccgttacttctttttgttttttaaggagagcagcgcatcacgatagctgctatcctgcattttgccgccgctttcgggatcatttgtttcctgatccgtgtcagaagtcttaaacttctgaagcgcctgacggtacacatcatcgcccattgtattctttttctcacggggagcttcagattttacaacgacgggaacatgctcggccgagcgttcctcggccggatcatgcttttccggctgttcggctgcagtgccgatcgcttctctggtttcttctctgacattctgtcctgcagcagtgctgcggacattgaatgtgataagaagtgcaattacaatgacagcagcaataaccgctataataatggccatataaccctctccttactgtcgtccggctgttaaattacctgtaacctggctgacacgtcggccaagcgctcggcctaattgaaggccttcttccgtcatcagcacatcgctgtcaaccgggcatgtgacgcctgcgccgtagtaagagccgtacagagcgttttcagggacgtttccgggaaggccgacaacaatcatgccttggtgaaacatcggagtaatcagattgtgcattgtcatttctaatccgccgtgcgttgtcgccgtcgtgcagaatacagcgccgactttatcaatcagctcgccttcagcccacaggtagccgagtttgtcgatccacgcttttaagcctgaactgatagtgccaaagtgtcctgggcatccccagataatggcatccatatctttcagcttgcggatgtcggcttgatcgacatggtcaatcagaacctcagcctcagcgttttctcttgctccttccgcaatggcttcggcaaggtgttttgtgtgttcgccttcactatcgtacactacgtaaattttcattcaggaaacctcccattcagatgattaagattccttcacttctttaggggccggaagcaatgacagctcctcttttttcttcgcccgctgtttgtctttccgtacgtcacgcaagaacaggctcaggacaacgccgataacagcgaaaatcgtcgcccacataaacgcgtcattaatccccataacattggaattaagtgaagctgttttgtagagatatgaataaacggtttgtttcgccgcatcaagcgacatgttcatgttgaccattaaattcgaaaccgcgctttggaacgactgcatgaagtttggatcagccgtgctcgttttatccgcaatctgcgaataatgcatagtcgtgcggttcgtataaatagttgtgatcaaacttgttccgattgaaccgctgatctggcggagcgtgttgctcatcgccgtgccgtggctgttcaatcgtgccggaagctggttcattccggctgtcataacaggcatcattaacagtgacataccgaatgcgcggatggcatagacaagcatgatatgcgtataaggtgtgtcaattgtcaattttgtatactggaatgtcgttgcgaccgtgatgaccagcccgatgatcgcaagcggtctcggaccgattttgtcaaacagaataccggaaatcggcgacatgatcagcatgacaatcgcgcccggcaatagcaagagacccgattgcagcgccgtaaagccgactaagttctgcaggtaaatcggaagcaggaacattcctgtgtaaagcgcaatggtaataatgatgttaatcacactggaaagtgagaaaatatcatatttaaatacccggaagtcgagcatcggtttttcagagcgcaattgctgaatgacaaacgcggcaatcgcgatgataccgacaatgacagtagacagaacgatcggatctccccagccgtcactgcccgcttcactgactccgtaaagcaatgaagcaaatccgacaatggataggatcgcacccaagctgtcgagtttgattttttgcggttccaccaagttcttaaagaggaagaacgctacgataataacgatcgccccgatcggaacaaggccgtagaacataatgcgccatgtgtaatgctcaatgatccagccggaaagagtcggtccgaccgcaggagcaaacatcatcgcaagaccgaaaatccccattcctttccccctgctttcaggcgggaagataagcagaatggttgtcatgacaagcggctgcaggataccgccgccgaccgcctgaattaaccggccgatcagcatggttgagaagttaggcgcgataccgcagactaacgttcccgctgtaaaacagaacatggctacgagaaagaggcttctctgcccgaaccgggtaattaagaaggccgataacggaatcaaaacgccgttgaccagcatgtacccggtcgtcagccactgaatcgtcgtcgcactcacaccgaactcggtcattaagtgcggcatcgccacgttaagaagcgtttggttcaagatcgccaggaataacccggccataagcacaataagcaatgttttaggactttttacttgattatctgatttagccacctaagacaacctcccttcatggtttgatgactgatctgtattattcagagatttttacagatgcgttcataccaggaagcaccttgtcagatgggttgctaagtgaaattttaacaggaactttttgcgttacttttgtgtagttgccgcttgagtttgaagaaggcagcatatcaaaagttgaagttgtcgcataaccgatttcttctacagttccgtcaaatgttgtattcgggtctccgtcaacaacgacatctactttgtttcctacttcaatgtctttaatgtctgtttctttaatgttcgcagtgatgtaaaggtgtttcatgtcaatttcctgggcaattgtcgtaccggcttgcaccatttggccgtttttcacttggtttttcacgattgttccatccatgatggcttttacgtcagcattttgctgtcctttgatttttgcaacaacgtcgtttttacttacttctttcccctcgtcaaggttccagtcagttactttacccgcagcaggagctgtgatagcagccatgtcgccggcaactttcgcttcatcggtttttacatagtgtgtgctttgataatagtagtaagcacctccgcctataattgcaagaacaacaatcaaaccgataatgttggtcagaattaaacgtcctctgttcattttgttttctcctttcgtttcttcctctatcattttgtggaatgatgataaaaatatgtggggatttttttatttaccgtttttcactgcacagccgtttgcaagcttcgttaaactttcggcaagcttgcgcaggtactgcaggtcagcggtattgagctgctggtataagatcgccgctttttcggcatattgaacagcagctttctgtagaagttcttccccctcttcggttaactgaatcataacaacacgccggtcgtcgtgatagtcgctccgatccattaagcggcgcttatacagaatatcggtcattctcgtgacagacgccggtttcagatcaagcgacaaagccagccttgaaagctgcgtgcttttgctcttatgtattttgaacatcagcagatactgcaggactgtaatatcataaggttccagaactgtctccagaatcattttctgctttttgtaaatcgatctggaagtatcaaacagctgttcaaaactgagcaaagcgagctctgattcaatcaccgtattttcacctcattcccttaataatagttcacaagataaaatattaataaatgtaagaaggtttgtaaagagaaaagtttcattttttaaggattttttttatgccgctttttctctttatttttaattaaaaaaagccgagaggaagaatcgcagccgcacgattcttcactcggctttttgtttaatacgatgctttgcttacacccgcttcttctttttgaaaaaagcttttcagcgcttgaaatacgtctgatttctgcttcaggatgtaatatttaaatttatcatctttgacatttttataggcggacatgagtgtggaatgcctgttatattgattgacctcaccgtagcagaacagattcgattttttcatgatgtcattgacaagctttacgcacctcgcattatccgatgttaaattatctccgtctgagaaatggaacgggtagatgttgtagcgcgcgggatcatatttttcatcaattaattcaagagacttccggtatacggaggagcagatggttccgccgctctcgccttttgaaaagaaatcttcttcagacacaaccttcgcttccgtatgatgggcgataaattcgatatcaaccgtttcatactttgtccgtaaaaatcgtgtcatccaaaaaaagaagctcctcgccatatatttttcccatacgcccatcgaaccgcttgtatccatcatggctaatacgacagctttcgattccggcttcgtcacatcattccatgttttgtatttcaaatcttccggataaatcgggtaaaacgacggcttgcctgacatggcgtttcgtttataggccgacagcatcgtccttttcttatcaatattccctgtcagtccggttttccggatatcattgaactcgatatcggtatggacgatattgtccctttctttttgctgcagattcggcagttctaattcctgaaacagcgcttcttccagatccatcaatgaaacttccgcttcataataatcctcgcctgcctgatcgccggctccctggccttttccggccccctgctttttatctgcgccgtctcttgcgacgacatcgccgacttcgctgtcaccgtcaccttggccgacatgtttgtttttatcatagttataacggattttatattcatcaagcgaacgaatcgggattttcacgacatcctttccgttggacataataatgctttcctcagtgacaaggtccggaaggttgttttttatcgcttcctgtactttcttttggtggcgctgctggtcgtcaaagcctttgcgatggagggaccagtcttcctctgaaatcaaaaaatttccgctgtcattacgggacatgaattcccctccttaaccgttatggtcgttttacatgtgtattccggcttgttcctgtttatgaaacaagtccggcgaaaagatttattcttatcttatgccggacggactttccaattgacaaacaattgcgaaaaacagacaaaagaacccgtccttatacggacgggcctttcatgaatcaagcatcagcggtttaacaagcttccgacatacttcagcagttcatttgcgcttgtcgaattatagccgtgttcatctattaaccgcgccactacctcattgacctttttaagctgctgctcatccggcgttttggttgaagtcgtaattttcaccacatcttttaagtcggcgaacagctttttctgaatcgcttcccggagtctttcatgtgaattgtagtcgaagcgttttccttttcttgcataggccgatatgcggattaaaatttcttctcggaacgcttttttcgcgttttctgaaatgccgatctgctcttcaatggatctcatcagcttttcgtcaggattcatttcttctcccgtcagcggatcgcggagcttatttttgttgcagtacgcttccacattatctagataattatccatgagtgttttagcggattcttcatatgaatagacaaacgccttctgcacttcttttttggcaatgtcatcgtactctttccgggcggcggaaataaaattcatataccgctctttgtcctcggcagagatggaaggatgctggtcaagtccttcttttaaggaacgcagcacgtcaagcgaattgatggattccatattttttctgataattgttgaggaaatgcggttgatgacatagcgcggatcgattccgctcattccttcatcatggaattccttcttcatatcctccagatcaacagaattgtaaccttcaacgctttccccgtcatagagcctcatttttttgacaagatcaatatcagaccggttcggttccttcagccgggttaaaatagaaaacatcgcagccacttttaatgtatggggggcgatgtgaacgtcagaaacatcactttcagaaatcattttttcataaatccgttcttcctcggacacctttaaattataagggacaggcatcacgatgattctggaatgaagggcttcattttttttattggcaataaacgagcggtactccgtttcgttcgtatgcgcaacaatcaattcgtcagctgagatgagcgcaaaccgcccggctttgaaattcccttcctgcgtgagtgacagaaggtgccacagaaatttttcatcgcatttcagcatttcctgaaactccatcattccgcggtttgctttatttaattccccgtcaaaccgataggcgcgtggatctgattccgagccgtattcggcaatcgttgaaaaatcaatgctccccgtcaagtcggcaatatcctgtgatttcgggtcggacggactgaaggttccgattccggtacgcttatcctcagagaagaaaatgcgttcaacctttacatcttcaattctgccgccgtaatcttcttcaagccgcatgacattaagcggagacaggctgccctcaattctgatcccgtattctctgtagaagtcttcgcgcagatgatggggaatgagatggagaggatcttcatgcatcgggcagcctttgatggcgtaaactgcgccgttgtctgtcaatgagtaggcttcaagcccttttttcagcatggtgacaagggttgatttcccgccgctgacgggtcccattaatagcaaaatccgttttcttacatcgagccgcttggcagccgggtgaaagtattcctccacgagccgttccagagattcttcaaggccgaacagctcccgcgagaaaaagctgtatgtctttttaccgtcattctcctcgattccgctgtcttttatcatattaaaaacgcgagaatgagcagactgtgcgaccaatggattttcttttatgatctccaaataatcagcgaacgtcccttcccatttgagacgctgctcttcctctctgtacttttcaattttctttaatatatccataagaacctcctctatcatggttaatgcactagaaataaggtactttgttacaatctatgcggtgatgtgaaatacatgcttttcgtttcttaaaaataaaggcgttttaaggcggtcattgacaagggtccggtgcaccgttcataatgaaagaaatacagtttcatccagactcggacagcaaatggaaaagcaaagaggaggagaaatgatgaaaacgatcattttactgggggtcattctcacttttttagtatccatttttacggcgggttacgacagcaagcctgaaaacgaataacggcaaaaagggtgctccttatgaagagcaccctttcctgtacaacataacaatgtttcatatttgaatgtgttcttggacagttgatttctcatgtgttttacagcttgttcgatactcgatttttccgattttgcaccccgggccgatttccacatgcttccctctgacgatgtccgctttcgtatattcgaggtaaaccgtgtctccttcaatcaattcagcagaaagcattcccgctttccgtttaagaagaccgggtttccgtctgacggtaatcgatgtgccgccgatttctttgactttgctttggtcataacgcaaatggatgtttacgtctcccgcgtttaacaatcccgccacattgatacagccggttacatgaagctgctccgtctcgcaatccccgctgacggtgagactgccttttatatggcactgctctcccgcagcactgccggaaatgtcagcaagtcctttcagcctcattcgggtgaaacgcatagagccgccaattttcagcgtgccgatcacatttgcggaacgagccgataaatctccttcaacctcatgctctccgaaaattttcagccgattggtttcggcatctccgagaaaacgccctgtaccgaatatccggcagcgttcgcttcgaagtccttcgccgacagtcccttcgcctttaatgcttacattctggtaggagcctccggccgcgtgtccggctccgtacatttttaaatgactcaatttttttgttgtttccactgcagctcctcctatattttcacgactttgtttactgaagcggaaggatcacatgtaaaatcgccgctgtattccaccgtctcaatgatgcatcccgcgccgatccgcacagttttcccgcgtactgtctgcgcgtttgtgtccgccaagtcaatgatgtcaccttcaatcagctctgcggtcagcaccggagccggcatcagtttaaaacgcgtaagcacgctttttctgctcatcaccttcaaatggcggcagccgatttccttcacatggctctcacccgccgccagcttcatactgacttcatcggcattcagcaggccgccgatcttgcatttgccttccgaacggaacgtctctgtctcacaatcgccttcgattccgactttcccggatatgaagatatcatcagctttcacaccgccgccgaaagatgaaaatcccgcgacgttcaaccgctccgttttgacatcacctttaatgacacccgttccgttgatacggatagattcggcttcagcgttgccggaaattttccccgaaccgctgatcgtcagcgtttgcgtcttgacattcccgtctgtttttccgctgccgttaaacagaaggctcgtgcactcgacatcacccgagaccgtgccgcttccgttgatctccaccgtatgaaaacggcctccttttgaacttcctgaaccgttgatgactaatttatctgttacgtccattgatggtcctcctgcatccatttcgtttttaattcttctgatgccgcagcaagcgccacccgttcaaccactttgacagatggttcaaacagaatatgttcagcgtctgagatgaagcacgtcgttacgccgagttttcggagcatgacgagctccgtatttgctttcagctcggaatcctcatacactttcagcacctccgccgccattttcccttcgtcaagattgatattgcctgactgcaaaagcccttcaagcacatataaagacagcagcgcgcgagctgtaaatgtcacgccgccttctccgtaaacttgcagcgcggcctttgaaatcagccctttttgaagcagctccgcaaacgttatgttgacatcagccatttgcggagacagcatttccctcatttcatccaaagacagattttctttcattttctgtatttttgagatacgttttaatatttccgctctcggaaaaaatgtttcctggcctgtaaacgttgattttcggataaaccattcctcaggaattaaatttttccgcttccagcggtacagctgtccgtatgagattgatgtttcttcaagtaattcttttttagaaatcagttgttcctccataaatccagctcctttgatgaaaacattgtaacataacactgttacgtttgttaagcctataaatataaaaatgtcatgaaccacggctacataaaaaaaccgccccgtatccgggcggttttttctcaggtcaaatctctgtaattttgctggcgcagcgcttcatagacaagaatcgcggcagtgttggacaggtttaatgatctcacatgctcggtcatcggaagacgcaggcagcggtccatattgttttcgatcaattctttcggaagtccgctcgtttctctgccgaatacgaagaaaacatcttcctccgtatttgagtagtcaaacgatgtatgcggcttttgcccgaattttgtaatgaagaaaaactttccgttctcatatgcctcaaataattcgtccaatgaatcatgatatacgacgttgacgaactcccagtaatcgagtccggcgcgcttcagcattttatcatcggttgagaatccgagcgggcggatcaaatgaagcgttgtgtctgttgccgcacaagtacgtgcgatatttcccgtattggccgggatttcgggttgatataaaacgacatgtaatgccacgatgttcacctctgttttttattccgcccaccattatatcattaattactcttttgtcgtatcatccgtaatatgaaaaaacgcatatctgatggaaggagtatacgccgttgaatcctcatatgaccaatatctcattctgctgtcatacgtttgggcattgacaagcggcatattgcttttatcttttgcgacgacaatcgtcgtatgattaaaacggccgtctccttcaaaatcatagcaaatcacatccccgggcatcagttcttcggcgcttgacacctgcaccgcgcgaagaccggcctttgattgagccagatacatcttcatggaatgcgcgaccgtccagctgtagctccatgaactttgcttcatccaccagcctgagcctctgttcggatgcccgcgcatcggcgcttttccggcatgcaaacattgcgaaataaaatttgtgcaattgtcgctgaaatttttataagcggggtttcgtttattccaaaacttttccgcgtactgaacggcagccagacggtcgtattgaaatgccctcccgaaatcttcccgttcactccgctcatattcgattacgctgtttccgtcagaaaatccagccggttttttctttacttcccgatctttaatcagcagctgatcatagagaaatgcagtccgttcctcaatctgctcttctaaataaagatgtccgtcctgctccttgcacaaatattcgaaatgaatcgtgtacaatacgcataacgtgccgtcgtcctcaagactgctgttgacaatgacggctttcgccttcgctttaacgatgtcaactttccgtttttcaagcagctctttttttctcgtcagggcttcaagatcgccggccggtccattctgcctcatctcggttccgttgactaaataatgaagccgggcctccgctaaatcttcaataatatgcttcaagcgctccacccaccatacttttttataaagaaaaaacacttgaactccggccaagtgctttttctctatacatatgtcaggactggccggttttagtcttatcagaaaccgatagcagttccagtccctttttaatttcctgtatggcttcctcatcctgctctttataaagcgctttttctaattccgctgcatattcctgatcaccgattttcccgatggcccaagcggccgttcccctgatgacagggcgcgggtcttggtgcatcaaggccgttaattcaggaagagacgatgcatctttgaaatgggccaatgccaaaatggcattccgctgaatcggcttcttgccgcgccatgagcctgatacatgtccgaatttttctttgaattcacggttgcttatggtcaaaagcggctttaacagcggctttgcgatttccgggtcgggctccatctgcggatgaagatgaaaatctttccctttattaatcggacagaccgtctggcacgtgtcacagccatacagacggtttccgattttcgtgcggaactcatccggcaaaaatccctttgtctgggtaaggaatgaaatacagcgctgggcgttaagctgtccgggattgacgagtgcgccggtcgggcatgcgtctaaacatttcgtgcatgagccgcacatatcttcaatcggcacatccggttcaaaaggcagatttgtgatcatctcagccagatatacgtaagagccgtattcaggtgtggtgatcatgcagtttttggcgctgaagccgattcccgcccgttcagccacggccctgtcggacaattctcctgtatccaccattgacttggtgcggatatcttcatgtttgctttgaagaaaattctccagcagatcaagcttttcccgcagaacgtcatgataatcctttccccaggaagctctgcaaaaaatgccgcgccggccgtccctcgtgctccttggcgcatctttcattttggaaggataggcaagggcgatggcgacgatcgatttggctttcggcagaagcaaagacggtgtgacccgtttttcaatatccggttcttcaaagccggataaatagccgagtgattcctgaagaatcagccggtccctcagactgtcgaatgtatcagccgtcgtaaacccgattttgtcgactccgatgcttttggcgtattcgattaattcctctttcagtttatggatattcattttttgcacagcctcctttctttgtgatcaggctccagcccgggtataatagagttttatcatcccggaatggagtgaacacaattgaacatcagtttagatcctcttattgctgaacgggtgccggggatcaaagcggcagccgtattatatgaacagatcgaagtcgggcccgccccgcaaatgctgaaaggccgcctccgtttatttcaagaatcgctttactttgattatgcagacggcggcatagatgaacagccttttgtgaaagaatgggcgcgtataatggaacagctcagccccgccttttctggacaaaaaacgccgatggaacttatgctcggcgatatttcccgggaacgattcgtcgaaagtgtgaattcagcccatgataccatactttttttctccttgaaatattcattgcccatcatggcgtatgatgccccagacatcgatgaaccgatttccattacgatcggagaaaaagaagacgtactggccttctccggcccggacggcgttttcggcagccttaccggacatatcaatacccgccccgttacgtccgatacgaaaaaaatgctgcagctgatctttttcccgccttcgtttcacgccgaagcggccgaagagctgttatcatccttaaccaatatgtttgaacaaattcacggaggcacccataccgtctcttggctttcataaaaagacacgcctttcgtgtcttttttcacataaaaaaacgcaatacttcgtttatcagagaaacgaaacactgcgttaataacgtatgtatggagcgggtgatgagaatcgaactcacgacatcagcttggaaggctgaggttttaccactaaactacacccgcatcaaaattattttttcagtaccgatttgatgtttctaatgttacatgtttatttatttttcgtcaagggaatgttaaaaaatttgtcgaaaaaaattctttttttgtccacatgttaagttgagtttacattttgttaagaatctcatacaatatgaaaaagaagaaaacttgaggtacgtctgatgatgaaaaataaagtaaaagagctgagagccagatacggctattctcaggaaacgctcggaaaagaagccggagccaccagacagacgattgcagcgattgaaaaaggagattatgtgccttcactcttattggcgcttaacatctgccgggctttctccctgacgatggaggaagtattctggctggaggaggagaaaaaatgagtttaaaaagcaaagcgtgttttcaccttgctctctacggattgtcctgctggacgctgatttcttttatggaagcaataccgcagatcgctcagtttttccaaacggaagggagcggttcatttgagctgaatatcactccgtttctgctgttttccgtttgtgccgcactgtatatctatgctgaaaagaaaaaacggaacggcaaacagcacaggcttgtgcccgacgaatttgaagagcaggatgagagagaacggatgatgacggcaaaagcatgccgttcctcgtatatcgccgtttacttctcattaccggccgcagccgttctgcttttgttttatccgcttattcagccgcatcttcccttttttccgattcttttgattttcatactgatgatgattcagcatttggcttatgttttcacttttcataggcatggcaaaaactccggttcgtaacagacccggagtttttatattaccagctcgcttttttcaccccgggaatccggcctttatgggccagctccctgaatgcgattctggacagtttaaatttcctcatatatccgcggggccgacccgtcaccgcacagcggttatgaagcctggccggagcagaatcacgcggcagtttgctcagcgcttcccagtctccttttgcctttaattctcttctgatgtccgcatattgttcaacaagcttctgccgcttgagttctttgaccgcttttgatcttttagccatttcagcactcctttttaaatcgtaatcatttcgttttaatagtatcattcgtatgtttataaagcaagcttccggcataaagaagacgggcctccgctaagcctacttgttcagcttcacataatagagtaatgcgtcagaatggctgatcagcatcttcttatttcgtgacattttgacgtgctctcctgaattcttcacactcgcgccgatcaatactggttccccataagtcactgactcggcagaggagataaacacggacgctctgtcatctccctgattctgggtaaaaacagcgtctgccgagactttcccgctatcatcggcgataccgaaacgaaccttgtctttttcctgtttccctttgtcttctcggtccgtgtaacagatgaattgcaattcttttggtttattcgcatcgccgctgtaatctgattgaatcggccctgctttatccgtcagttttcagttttggtaatgttcaatatacatctgtgcggccgccaagtcttttgtgacacctgtcactactgccgctccgctttctgacgaggcaatttccattctgtatttctctgtctttgataaatcagcttcttttatctgcatgccattggaatgtccgcatgccgttaatcctgccagcagacagcacgctgccgcccaattgaataccttcaccaaaaaacacctctttttgatgattgtaacattatcagaaaaaagaggcatttgtttattcagaccgtcgctttgttccctctcgcaaaatggtcgttgcccattgcttcgcccagtcggtgctcaagttttttagtccgctcattctgaaacggcagaagcggaaaaacaagctcagccagataataagcttcttccagatgcgggtagccagaaaagatgaacgactcaatgccgagtgcctgatactctaaaatacgatcagcgacggtctgcgggtcaccgacaagcgccgtgcccgctccgcctctgaccagcccgatgccggcccagagattcgggctgatctcaagcttcgtccggtcaccgttatgaagatcggccatccgtttttgtcctgaagaatcagcgcgtcgcagcgcagcctgcgctttcgcaatcgtctcttcgtctaaatggctgattaatcgttcagctgcttcccatgcctcttcttctgtctcccggacaatcacgtgaagcctgatgccaaaacgcatcgtccttccttctttggcggcctgttttttaacggtttcaatcttttcttttacctgctccggcggctccccccatgttaaatacacatctgtatgtttcaccgcagcctcaattcccgcttgtgatgaaccgccgaaatataatgggggatgcggtgtctgttttggcggaaacagcagattgctgttttccactttaatatggtccccttcatatgtcaccgtttcgccccgcatgagtccgcgccagacggtcaaaaattcttcagtcgccttataacgttcatcgtgactgataaacatgccgtctcccgccagttcataagggtctccgcccgctacgacatttacgagcaaacggccgtctgagagccggtccattgtcgacgccattctcgcggcgacagatggctgcatcaatcccgggcggaccgccactaaaaattttaaatccctcgtttctcccgctaaagccgcagccgtcagccacgggtcttcacatgacctccccgtcggcaaaagaacccccgtatatccgagtctgtctgccgcctgcgccacttgcttaaaataaagatgatccgccgttctacctcccgtttgcgtccctaaataccggccgtctccatgcgtcggaataaaccaaagaatttccatatgaatctctccttttttatcggttatccttcataactgttccgccattttaagagtttccgttcgagcattctgaccagcgcatctgtcagcttgccgacagccgcaaaaatgataatgccgacaaacaccttatttgtctgtgaaaattgtctcgcatccataatcatatagccgacgccctcactcgatcccataagttccgccaccacaagaccgagccacgcaataccgagagagagcctgatgccgagcagtatattcggcagggaagccggaagaatcaatttcgtcatctgctgataccagttaaattccagcacccttgcgacatcaaacagcttcgcgtccacaccgcggatgccgagaaacgtattaatatacacggggaaaaaagcccccaatgcgatcagcagaatttttgaagtctcatcaaatccgaaccacaaaataaacagcggagtcacagccaagtgcggaacagttctgagcatttgcagagacggatcaagataggcttccgtccgttttgagaaaccgaccagcagcccgaaaacaagtccgaggccagcaccaagcagaaatccggcagccgcccggtataagctgatctctaaatgaccccaaagctctcctgacagaagaagttcctgaaaagtctgcaaaatgatgacaggtgacgggagcaccgtggctgagacgatgcccagacttgcgataaactgccatactgcgatgaccgcagccgggagtacaacccctttcatccattgatatgaataccgccggggctttgccggagctttcttttctgattggcttattgcgccggcagccgttgatgcttctgctttcattatttaccgccccccgttttaagcgccttttggataaatgaattgtcgacaacgtcctttacatcaattttcttttgaatcgcctttgtctgatattgaaaatccgcggtttcctgctgggctttgactatatcatcattgatcggttcattgagaggctcagtattgttgagcacgtttcttacgactgatggatcaagatttttgattttcgcatataaggagacagcttcatctttatgttccttttgccatgtaactgccttattgaacactttcagaaaacggacaaccccatccgggtgctctttggaaaatcccgttctgactaacgtgaaaccgggagaatataaatctgtgctttctccgttcgccaacatttccgcgccgtgctgcagcgtctcaatcgacaaatacggttcccaaatggaccacgcatcaactgatttgttttcgaaagcggaaaccgcctcatcaggctgaagctggatgatggtgacgtcatcggcggaaagtccggctttatccaacgctttatagagaaaatcaaagccgctgctgcctttggctacggcgatttttttcccctttaattcttgcaggctctgaatcccgctgtctttgtttacaagaatgccgtttgcttttaacccgtcctgagacagcccgatctctttaaaatcaattcctgccgcttgaccggaaatgaccggtgagttgccgacctgagaaaaatcaagcttatcggcggcaagaccttcgaattgcgggggaccgctttggaattcgacccattttacctttattccgtcttttttgaaggcctcttcaaaccagcccttttcctttgcaatgagaagcgggcttaaactctgctggatgccgatccggatttctttcaccgttttcccgctccctcccgctccgtgggcactgcatccggttaacatcatgactgctgcggctaaaagaataatggtttttttcacttcgcttcgtcccttctatattccagatccatccgcaaaccggaggtcttccgttttctcaaactcagaaagcaccttctgcctgacgtcctgaaaatcagctgacgtacgattgcgcggatgcggaagctgaatcggcatcagactgtgcagccggccgggctttgccttgagaatcgccagcttatcgcctaaataaacggattcatcaatatcatgcgtgaccagaatcatcgtcgtttttttctcgcgccatatatcaagcagcacatcctgcaaatgttttctcgtaaaggcgtcaagcgctccgaacggttcatctaaaagcagcacctccggctcacgcaacagggctctggcgatggcgacccgctgcgacatgccgccggatagttcgcgcggataagcgttctccgctccctgcagcctgacaacctcaatcagatcatccactttttgacgaacggccgggtcgttgatattgaggtcggcagcaatgttttgttttaccgtcagccagggaaacagccgatgctcctgaaagataaatccctgccggatgcccggtcccgacacatcgcggccgtttattgtgacagagccttcataatcggtatcaagcccggcaatcaattttaaaagcgtgcttttgccgcatccgctcggcccgatcacagtcaaaaattctcccgatgcaattgacagttcaatatcattcagcaccggtgttttccggccttcatgctcaaatgctttttcttgtatgctgatggttacagccatctgtcttcccctctttttctgccgcatcgctcgaaaaacaaaaaggctcccatctccaattgcttgtagagatgggagccttcggcggtccgatcggctgcccgtttgtttttaaatttgaatatcatgttaattcaaattattccgacttgtcaactgttttttgtatgaattaaaatacgctctccggcatttacctgccaaagagcgcatcagctgtatcacgtatttacttccttttgcggccgggcgattttcaataatgttcgcgcattgtttccgaaaattttttctatatcttcttcccgcatattgatttcccggcaggtcctgacttgctcctgaagatatctgtatacatatccccgcggaaaaccgtttgaatccgtcccgaagatgatgcgttcagcaccgattaattcggatgtcttccgaaacagaatttccaaatcaagcggatacggcatccacctcatccactggtttgaaccggacgtgtcaatatacacattcgggcagctccagcacagctgaagcagttcctgataatatccggcgccgaaatgcggaatgatgaacgggatatcagcatactctctcgcgacgcgatagatggagagcggattgatgttgcggtggctgacaatgcccccggcccttcctaaaagcccgaagtgaatgagtacaggcagccttttatcagccaaatacgtccaaagctttttcagcgaaggatcatgaaaatcgatgtctgtcagcggaccgaacagtttataccctctcaaaccgagctcttcaaccgctcttttcagctcttcatacgcatcctcccgctccaaagggtgatatgcaaatccggtaaatttcgcgggattggcttgaataaacgccgccatccggtcattgctctccgctgttaaaaaattcagcacatcgatgccgtacttatttaattcattctcccactttgtcatcaaaggggtttctccgtcatcgccatcagcatcacgcggatcaggaaaatcccaggtaagattcattctgtctgaacgctcttggttataatcggaaaatgttttatcgtttttgccgaaataaaggctgtacggcagatgaccgtgaatatcgacaggtttaaaatgctgccggaaaagcatacaatcgccgcctcccttaccgcctgacaatgaaaaaaggcccttatcccatgaagaataagagcctcttgtgtccaagtcagcggttgctattttttctcatcttaaacctattattcctgtcagtcaagcaagctttcaaaactcaaattccttatttcgataatacaaataattattttataatcattataaaataatattgactttttattgataggtgatattatatttttataaatctaaagaggtgatcacatgagttcaaataaattaacaaccagctggggcgctcctgtgggagataaccaaaactcaataacggccggcgatcgcggccccactttaatacaagacgtccatctgcttgagaaattggcgcactttaacagagaacgcgttccggagcgtgtcgttcacgcaaaaggcgcgggggcacacggttattttgaagtcacaaatgacgtgacaaaatatacgaaagccgcatttctgtcagaagtcggtaaacgcacaccgctctttatccgtttctcaaccgttgcaggcgaactgggctctagtgacacagtgcgcgacccgcgcggatttgccgttaagttttatacagaagacggaaactacgacatcgtcggaaacaatacgccagtattcttcatccgtgatgccatcaagttccctgactttatccatacacaaaaaagagatccgagaacacatctgaaaaacccgacggccgtttgggatttctggtctctgtcaccggaatcactgcaccaggtaaccattctgatgtcagaccggggcattccggcaacccttcgccatatgcacggattcggaagccatacatttaaatggacaaatgataaaggcgaaggcgtctggattaaatatcactttaaaacagaacaaggcgtgaaaaaccttgatgtcaatacagccgcaaaactcgcgggcgaaaatcctgattaccatacggaagatttattcaatgcgattgaaaacggcgatttccccgcatggaaattatatgttcaaatcatgccgttagaagacgcaaacacataccgctttgatccgtttgatgtcacaaaagtatggtctcaaaaagactatccgctaattgaagtcggccgcatggttctggaccgcaatccggaaaattactttgctgaagtagaacaggcgacattctctcccggaacattagtcccgggcatcgacgtctcacctgacaaaatgcttcaaggccgattgttcgcatatcatgacgcacatcgctaccgtgtcggcgcaaaccatcaggcgctgccgatcaaccgttcccgcaatgaagtgaaaaactatcagcgtgacggacaaatgcgttttgacgataacggcggccgctccgtctattacgagcctaacagcttcggaggaccgaaagaatcacctgaggataaacaggcggcataccctgtatcaggtttggcagacagtgtaagctatgatcatcatgatcattacacacaagccggcgacctgtaccgcctgatgagcgaggaggaacgcgcacgccttgtcgccaatatcgtcagtgcgatggaacctgtggaaaaagaagaaattaagctgcgccaaatcggccacttctacaaggctgatcctgaatacggcagacgcgttgccgaaggactcggactgcccttaccaaaataacatcaagaaacctgccggtctgtccggcaggtttttcctgtttattatcaacaaaacccgttttttctcaattacacaaagtggcatgccgcaaaatgatgaagccctttctcggaaagcggcggacttttttcggcacatatcttcttggcggccggacacctcgttcggaatttacagcctgagggcggatcagcggggctcggaatatcgccctttaacatcacccgctccctttttgctccgggatcaggaacaggcacggctgataacagtgctattgtataagggtgaagcggtcttgaaaaaagctcttcctttgatgcgtattccacaatcgtccctaaatacataatggcgacctttgtacataagtgctccaccacgcttaaatcgtgggaaatgaacaaatatgacagcccgtgctgtttttgaaggctgctgaacaaattgatcatctgcgcctgaatggacacatccagcgccgccacgggttcatccataatgataaattgcggctcaagcgccatcgctctagcaatcacgatccgctgccgctgccctccggaaaattcgtgcggataacggtcgatcaagtttgcggaaagaccgcaggcttcaagaacctccgccgctttatcacgcgcgttccgcttcaccgccaactgatgctcgatcatcgcttcgccgatggcttctccgatccggcgccgcgggtttaaagaactgaaggggtcttggaaaatgaactgtgcttccgatctgaatgttttcagctcgcgccgattcatctggaacacatcacgtccctgaaaaaacacttctccccctgttttctcatgaagccttaaaatcgtttttccgattgatgacttaccgctgcccgattctcccgccaggccgaacacttctccctttcctatcgtaaaactgacgccgtcgaccgcttttacgggttttttatgagtctttctcattcccccttgttcctcataatattttttcagtcccttgacctccagcaacacatcactcatctgctttctcctctctgtaaagccagcacgccgcctgatgtcctttcccaaattcagtaaaatgcgggctcgatctccggcatatttccgtgctgtgttcacatcgctccgcaaaataacaagatgatccggacagatccgcaagctcagggacctgccccgggatggtgtacagcgtctcccttcgttgaccgatgaccggttttgccgcgagcagccctttcgtatacggatgcttcggatcggaaaacatctccgcaaccggtccttcctccacaatttttcccgcatacatgacaatcacataatcagccatttcggcaaccacgccaaggtcatgggtaatgaataaaatagacgtgtgaaattgctttttcacatcccgcaataaatccaatatctgcgcctgaatggttacgtcaagcgccgtcgtcggctcatctgcaatgatcagtttcggatcgcagctgagcgcgacagccgtcataatgcgctgcagcataccgccgctcagctcatggggatatcggtgcatgacctgctcagcatgagggatttcgactaacgtgatcagttcgactgccttccgccacgcctctttcttactcagcaataaatgttcacgtataggttcagtcagctgctcaccgatcgtaaacaccggattcaaagaggtcatcggctcctgaaaaatcataccgatttcgcagccgcggattttctgcatttcttttggtttcagctccaacaggtttcttccggaaaaatgcaccgctccccgttcgattctccccgtctcgggaataagctgcataatggacaatgacgccatgcttttcccgcagccggattcccctacaatacaaaccgtttcctcctcatgaatcgtaaagctgacatcatccacggcctttactgtgccttcctctgtataaaaagccgtttccaaatgcctcacttctaaaagcggttttttcatttcactttcacctgccgttttactttaggatcaaaagcatctcttaaaccgtctccaagcagatgaatcgccacaacggtcaaaaaaatggccgttcccgggggaatccacagccacggacggagtgtaaaatccataaaattattcgccgcttccatcatgtttccccaggaaggagtcggcggagcaacgccaagcccgagaaaactcagcgccgattcactcagcatcgctcccgccacatgcaaagtcgcggctaccagtaataacggcaatgtattgggaagcaaatgatagaggatttttcgtctatcactaagccccagaacttccgcggccatcataaacggctgctccttcagcgacaaaatctgtccgcgcacaagccgcgccagactgggccacccgatcagacttaacatcatcataatcaagtacattctgtattcagaaggcactttccattccgacatcaccgcagctaaaatcaaaagcagcggcagacctgggatagacatgagcatatcagcaatgcgcataatgatcatatcagcggctccccgataaaatccggccgctgctccgagcaaagagccgatgacaagtgacagcaccattgaagcaagccccacggtcagagaaatctgccccgccagcatcagcctcgtcagcacatctctcccgtactggtcggtccccagccaatgatgaatcccgggatgctgattggcattagaaatatccgtccgatctgttatgtacggagaaaaagacggcccgataaaacacaataaaaacataaaacataagaacagaagactgatgaccgtcagcttatgatgcagcaggcggcggtacgtctgcttccaaagcgaaggcggcgtccctttctgtattttcatccgtgaatcccccctatttcagcctgactcgcggatcaatcgcggcataagcgatatccgccaagaagttcccaacaatcgttaaacaagacaaaaacaaggtaaacgccatcaaaaccgggtagtcccgataatgcacagattccagctgaatacggccgacacccggccacccgaaaatctgttcaataatgatggccccggaaaacaatcccggcagttcaaaagcaagcagggtgacagccggaatgagcgcatttttcaacgcatgcttccaaatgacagtgcgctctttcaaccccttcgcccgcgccgttctgatataatcctgcctgatcacatcaagcatcccggagcggaaatatcttgtcagcgagccgatgccgagcatagataaaatcacaaccgggagaatcatatgcctggcggcttcaagcacgtaagaaaaaccagaactcgtgcttccggtatcaatcatccctccgacgggcagtatttttaaatccactccaaaccatttaataaacagaaggctgataaaaaaagacgggaatgccatggaagcaaaaacaagaaacgttacgatcccgtcaaaccatgagtatttcctgacagcggatatgacacccgttatcatcgcggcagaccatgtgataagcaaagccagaaacgcgacaaaaaacgaattccagacatatttctgaagcagcgacaggacgttttcctgatacttcaaagaaaaccccaaatctccgctgaacacattgccgagccacgtcacataacgccgccaaatcggctgatccaggccgtaaagcgcttttagctccttcgctctttccggagtcaagtttacattcgaatcaatataatcgcccggcagcatggcgaataagaaaaaaataataaaggacgtaccgaataagatcacaagcatttgtatgaatcgttctgcggcataccgtttcacaaaaagcctcccccttccgctgaaagggcaaaatacccaggatgcaccgggtattttgcctaattgtttttattgaattgagacctttgagagacttgaactgattcccgaataattgtcaggctcaagcccttttatttttccgctgacagcccttgcgctttgacggtaatggatcaggatgtaaggcggattctccccgagctcccgatacagctggtgataaatctcttttcttttgctgatatcaagcgtgccggccccttcctctatcagccggtccgctttaggattggaatatcccgtcacattattgggatggccggaagccagcttttccaccgtgtcattcggatcaagaatctgcgatgtggaaacggcggcaagatcatactgtttatcatttattttcgctacctctgtattaaaatccatcacttccggttttaatgagattccgatgtccgcataattttctttcgcgatcgggatgaaatcatcatccgctttagaggtgtaatagctgatttcaagctttttgccgtttttttcacgcacgccgtcttttcccgttttccagcctgcttcatcgagaagcttcttggcttttttcgggttaaacgtgtacggattgacacctttgtcgttataagcccacgaaaccggagacaccggcacatttgcgacctctccgtagcgtttaaagcggacatcgacgattttttgacggtcaagcccgtaaataagcgcttgggacactttcttgtcttggaaaggcggacgcttatgattgacgtacacaagcccgtaatcattcacgacagatacgctgatattcgcaaaaccaaggctttttaaatgctcaaccgtatcatcatcaggtgaaaaagaagcgtaatcaaggtcacccgtttcaaacagctgaagggaagttgacggatcgataattttataaatcagcttttctgttttcggttttccggaataatagtgttcattggcctgatagcgtatttcctgtcccggaaggtattctgtaaattgataaggtcccgctccgatcggtttggcataaagctcttttaaataatccagtttgccgaatcggtaattctttccgtagtaggcttctgacagcacctgccctcccaaaagaagcagcgacttcgcactgactttctcggtcgtgattttaatggttctgtcatcaaggacatgaatgccctctatcgtctttgcttttccttctttataagccttaccgcctttaatataagccgtggtgatatcttcatagcccgcgtatgcaggatcatgcagcaatgttaaagtgaatgcgacatcctttgcggtcagcggcgaaccgtcgctgaaaacgaggttttttcttaagcggaacgtgtaggtaagctgatctttggaaatcttccagctttccgcaagagccggtgcgggcttccccgttttatccagtttgactaacggttcaaaaataggatctgtcgcatttccgtcccaaccgttttcataaaagtacggcagaaataccccgcccggcgcggatatccccgcaacaaaagtgtcggttctggctttcgactttgcgggaagcgcctcaggatgagaagctttaaattcttttgttttgacatgggcgatacgtgtttcttcctttttatccgttgcagaagatgcttcttctccggcacttcctaacgcgcaccctgataacatgaaggctacagacgacgcgagtaagatgcccgttgtttttatcttcaatgtgttcctcttcattttgatcggacccccgcatgcttttcatctatctttatataaatctgctccatctgttcttgattcctcataatctcccgtttgtttttctctacaagcagttcgaaattcaatgtgtgttttctgtacttttttcgctttttactctttttgcgcactggtgttgccttttgtaacgccacttttcatccctccgcttttcattcaatggcttttacgcaaaaaaggcccttatctgtttacaagataagggccttcggtgatccgatcagccatcgtttggaaatatgtaatgattatgttaattcatacaatccctacctgtcaactataattttaaataacgtttcctcccgggggttttcctcatacactctcttatttttccgcatatgttagaaaaaatagcagattacgagtgaaagagagtgagagtatggaaaagacaacattgaccggacgcatcgtcagaagggatgatccggactataatgaagcaagaaccaatatcaacttaagcctgcaacgatatccagacatcattgtgttttgccaaaacaaacatgatgccgtcaatgcgctgaaatgggcgcgtgagaataacgtacctttccgcatcagaggcggaagacacagctacgagaatttttccctgttaaataacgggcttgtcattgacctcagtgaaatgaagaaaataagggtagataaggataagcggctggtctcgattgaagcgggtgccgaattgggagatgtgtaccggacactctggcggtacggcttgactcttcctgcgggaaccatcgcaaatgtgggaatcacggggctgacgcttgggggaggaatcggatatttaacaaggtctgccggccttacttgcgatcgtctcctccagctcgagatgatcatagcagacgaaaaagagggtgccaaattgatcacagtcaaccgcgcaaagcactctgatttattttgggcgtctcagggcggaggcggcggcaacttcggcattgtcacttccatgatgtttaaagccgtgccgatttcgtacgtgactgttttttctgtcacttgggactgggatgatttcgatgaagtatttaatacgtggcagaactgggctccttttacagataaccggcttacttcatcaattcagttttggcctaaggaagtcaaccgcatagaagcgctcggccaatttatcgggacaaaagatgagctgaaagaactgctggctccgttaatgaaagcgggaaacccgacaagcggcatggtcaagacagttccgtttattagagcggcagccttttttaacagcccgggaggcaatgagccgcaaaagatgaagcggtcaggatcctttattgaaaaaccattgtcaacacgcgcaatttctgctttaaaatactacttgcagcacgctccgaataaaaacgccagtgtctggcagcaatctctcggcggggcggccggacggatcgctccggatcaaacggcattctactatcgcaatgcaatcattgctcaggaatatataacaaactggacttctcctgaagaggaaagacaaaacgtccgctggatcgaagggctgagaacatctctttcaagagaaacgatgggggattacgtgaattggcctgatatagacatcagaaactggctgcgaacatattacggaggaaatgttgaccgcctccgtcaagtcaaaacgaagtatgacccggaaaacgtattccgctttgagcagagcattccgccgcttcgccggtcaccgtttttctaaaaagatgaagatggacacactccatcttcatcttttctttttattgatataaacggcttcccttttctgcaaactcttttgctttttccttcaatccttcattgactgcctcgtcttcagtcagaccgttttctttcgcataatcgcgaatatcctgagaaattctcatgctgcagaacttcggaccgcacatcgaacagaagtgagccgtttttgcgccttcagccggcagcgtttcatcatgatattccattgctctttcaggatcaagcgacaaatgaaattgatcgcgccaccggaattcaaaccgcgccttagacagagcgtcatcacggatctgagcgcccggatgccctttggcaaggtctgcggcatgtgccgcgattttgtacgtaatgacgccttctcttacatcatcacgattcggcagtcccaaatgctccttcggcgtgacataacaaagcatcgccgtcccgtaccagccgatcatcgccgcgccgatcgcagaagttatgtggtcatagcccggagcgatatcagtcgttaatggcccgagcgtgtaaaaaggcgcctctttacaaatttccagctgcttgtccatgttttccttaattttatgcatcggcacatggcccggtccttcaatcatcacttgcacatcatgcttccatgcaatttccgtcaattctccgagagtctccaattcagcaaattgcgcttcatcattggcatccgcaatcgaaccgggacgcagcccgtcaccaagagaaaaagcaatatcatatgtcttcatgatttcacagatttcttcaaaatgcgtgtacagaaagctttcctgatgatgagcaaggcaccattgcgccataatcgccccgccgcgggagacgatccccgtcgtgcgtttggccgttaacgggacgtaacgaagcaatacgccggcatggatggtgaaataatccacgccctgctccgcctgctcaatcagtgtgtcacgataaatttcccacgttaaatcctcggcagcgccatttactttttcaagcgcctgataaatcggcaccgtccccacaggcacgggggaattgcggatgatccattcacgtgtcgtatgaatgtcttttcccgtcgataagtccatcatcgtatcggcgccccagcgaatcgcccacgtcattttttcgacttcttcttcgatagaagatgtaacagccgagttgccgatatttgcattgattttcacatgaaaattccggccgataatcatcggctcgctttccggatggttgacgttagaaggaataatcgcccggccgctcgccacctcttccctgacaaattcgggagaaacatgctcgcgtattgcgataaactccatttccggcgtaataatgccctttctcgcataatgtaattgtgttatgtttttccctgccttggcccgccgcggcttccgctgtaaaccggggtattcggcagtatgatcttcttttttatagccgttatcctcaggcttcacagtccttccggcatattcctctgtatcgccgcgcccggttatccactctgtgcggagcggcctcaggccttcatgaatatgaatctgtacatccgggtctgtatacggtccgctcgtatcataaacacggaccggcggattctcctcttcaccgaacgcccccgttgttgcactgaggctgatttcacgcatcggcactcgtatgtcaggcgaagaacccttaacataaacctttttactgcctgaaaaactcgacataatagaaatgttcgcttgctgtactgattgattttgcatacaaatctctcctttatcatttgaataacagaaccaagctcagcaccagcacaaaaaaccgggttctctatagaacccggttttgcagtcagaaagaaactattattgtttcatcaacaataataaaacctttacttccccacgctggtacgaaccagatcaggtccaaagggttaagaagccgccgcttctctctcagcccgctcagacgggcacccccagtaactatgaatttcggtttcatcgtaacataagttgcatacaaaaaaaagtatattattaaaattcagataacgaaacggtcttaagctctgtttccctaacgccttcttcggtatcaaaaacccgatacccctttgccgttttccgggaagagacagcttggaacagctgaccgtctttataatgcagcgcagcgccgtcatcagcggcatagccctcccggagtttcttttctgaaatcagacggtgatacgccggtctgcgctccgcctctccgttatagtgaggacaaaagctgcccggcaaaaaccctaaagcccgcagctctctcaaatctcccgctgaatccgtcacaccttcttcaaaccagcaaatcgccccggcgctgagacctgccaagatgatgccgctttcccaagcctcacgaagaataaggtcaagcccccactctttccataagacaagcatattacgggtattgccgccgccgacatatataatatccttcttcatgagaaaagatctgaggtcagaacgaggcggtttaaacagcgacaagtgatccggctcacactccagcttatgaaaggcctgataaaacctggcgatataattctccgaatctccgcttgccgtcggcaaaaaacaaactctcggctctgatctcaccgactgctccaaaatatattgatccagcacaagatgatccggctccatggaaaaccccccgccgcccaatgcaataatctgcttcatcgtcctcacctcttttttctcaagtataacttaaaaaggcgttatcccattccggatgccgccttcaaattatttctttgttatctgaaaaatgaaaagacaccgtataaaacaacggagatccctgcagcgataagcgccggaacaagcttcgaacgggcatacttcacaacatcgatccccaaaaccgtacaggttgtcaccgtattatcactgagaggggaagcaaacgctccaaatgttccgctggcaaaaacggccccaatcgctaataataagctggtatgcgactgaaccgccagcgtcacgccgagcggcattaaaagcccccaagtcccccaggatgatccgataaaataggatataaccgctccaagtatgaaaagagatggcgcaataaacatatgtgggatccatgacgttaaatgagaagtaacatatttcgaaaaacccagatcctcagatactgctgttacggcccaaatcagcgataacataattataacgtttaccaattcgtttccgcccttaataaaatgcgtcacaagctcgcttgcgtgaaaacgctgaaacataaaaagagcaaatgctgcaataaccgctgccaataaagcggttaacatgacgccaagcatatcgcttttgataaaagcattcaaaaacccttgtgcttttgaatggccgtcccaccagctgagaaacagtgttaacagtaaaaacagcccgattggaatgattaaattccacggccgaatcggtgtttccttaatataagcacggtgcgccgaatctaactcctcctgctggtcagcatgtacatccccgctcttttcgaacatccccgtatgtcctccgtgaatatccgggatcgtccctgtttccatgttaaatgagccggagccttttgaaagcaatacaccgctgttctgcggaatcggttccgtatgtttactatgttcccgagaaggaatttgtctgttccgttctgttttttccaagctttcatcctctttttgtttcttaaaaaagcagtaataaataccgactaaaataatcacaatggagaaaaaattgaagggaatacttttcacatagaccgtgtaagccggctgatctatccctgacgttttgagggcctgtccgataatggaaaccatgtacccgacaaatgccgttgctaccggaatcaaggcaatgaccgggtttgccgtaaactcaatagcatacgcaattttctgttttgacaggtccagacgcttgcttatcgctttcatgatcggcgcaattgtaacgatgcgaaagtccggttcgctgaatgtgccaaatgtcgacagccatgcaagcagcatcgcgccttttttggttttaacctttttactgatcaaatggacgaacccttttatcccgccggttaactttataatccccacaaggccggcaaatgaatatagaaaaacaatgattctaatattattgattacgacaatgttgctgatcaaataatgaaccatatgctcaatcccgccaagcaagctcggatgtaaaagataacttccgaccagtaaaccgacaaacagaccggactgtacttgctttgtaatgattgaaataggaatgaccagaataaatgggataaggcaagcccaagtaccttccataaaaaacacctctttcaaagaactttttgttagtatctttgaaaaatacggatttatacaatccgcaggtgtatcatgtttttatacaacaaaaaaggcttctacattatgtagaagcctttgtataccggtggccggggtcgaaccggcactccagaaggaacacgattttgagtcgtgcgcgtctgccaattccgccacaccggcatgtaatgtcgtgttcaaccgacgtatataaatataacatgcattttataaagtgtcaacggttttagtaaagtttttttgatggtaatgctgtatacacacgaaataaggagatacctatatttatagtctttacgtttttattataaaaaaagtgatctgcaatatgcaaatcactctcatatgtgttttataatgtgaagtttgatgaccaatttaacatgattcgtccaaagttaaattggtgccgagggccggacttgaaccggcacggtagtcacctaccgcaggattttaagtcctgtgtgtctgccaattccaccaccccggcaaaagaaaggcgacacccggattcgaaccggggataaaggttttgcagacctctgccttaccacttggctatgccgccgtaatttggagcggaagacgggattcgaacccgcgacccccaccttggcaaggtgatgttctaccactgaactacttccgcagtatacacaagaactcaatacatcttatgcagttatttaaaaaatgcaactgggctagctggattcgaaccaacgcatgacggagtcaaagtccgttgccttaccgcttggctatagcccaatgataatatggggcgattgatgggaatcgaacccacgagtgccagagccacaatctggtgcgttaaccacttcgccacaaccgccataatctgaagatgagtaaaaaatatagtggcaggggcagtaggaatcgaacccacaccggaggttttggagacctctgttctaccgttaaactatgcccctattgataagatggtggaggggggcagattcgaactgccgaaccctgagggagcggatttacagtccgccgcgtttagccacttcgctacccctccatcatttagagtgccggccagaggacttgaacccccaacctactgattacaagtcagttgctctaccaattgagctagaccggcaaatggtggctcgggacggaatcgaaccgccgacacacggattttcagtccgttgctctaccaactgagctaccgagcctttttttattgcggtttttatattcgttttcgtcctgctcgtcacctcaaacgcaagtggtgcgttattgtatatcactgcaaaacctccttagtgctgcggcgtaacgatcatttgcgctacaccgtagcctttttccgcatcatacggagacttgattctcataacggttccatagcctccgctttccgctttagtcgcgattccgccaattgctgatacgctatcccctacggacactgtttcgtcaatcctgacaaagacttggccgatcaggccgatgacatgccattcgtcacgagagtcacgcggcacatattcgagagaagggtcgtagtcggggtttaattttggaacgcttaactcttcgccgccatcgataaccgtttcgtaaaccaagccgccgaattcgtttctttcgaactgatcgttccaatagaacgccgcgcctccgagcaccaatccggccgtttccgaaacgactccgagtatcttatctccttcgcccgcttttcgtatcttttcgccttctagcgcgacgagatagctagaatcaattttcttgccgtcagcagactcaaaatactcagcgaagtctttgaaatctgagacgctctccactcgtcctgtgccgcgaatatggccgccagttgagtcgagttcccatttcgtatttccggtcgaggcacttccgcttccgtagccccctctgacgctatatccgttatcgttgataaccccgttggcagcgagtacgaccctcgacggcccgtcaccttttgtatgtgaattgtttgacgctataaccgcttgacgcgaagctgttgtggatgagccaccactggcgcctaaaacgacgtttctaggtcctttcgttgtacatccgcccgtggtcgcaatgattgcgcttgttttgtctaaaacgtgacctgatgtagaagcagcacggaacccacctttcacgttgttagggacgaccgaatgtttctggcccccgagtactgccgcactttcgtaaccatacgcccggaccattaagatatttgtttgcgtattcggcgatgtgatgccggccgtaccgctagatacgtgaagaataccattttccaagtttacgttatagacaccgcccccgatcccgataccattttgcgctgaatcatggataacgaaatcagaaatgaggacgtcatctgtgcgctgatcacctccggtaatgttgacatcatagccggcctttttaaaaccggaaatttgcagaccagttacagttatcttccggctcttatattgaaaagctatcatcgactttcctttgtagtcatacgtcggatcaccgattgcagtaaaaccgattatcttaacacgttggtacgccgagacgactaaagctttcggttccagtccgtcatacagcgaattgaatatcggctctcgcgcagtacagtcgatcagcgttacgtccctcgccgtctcgctccatggatcagtcgctaagtggtgtcctatatgccgcaagtcgaatgagcgcacatcccggaaagattcgtgtccgcgaatatggacgttacaaggcgccggccattctgtatgagccttcacctctacgcctcggatgtttccttcagtgtagttatcaagaagccatacgtgtttagatccgtcatcgacttcgataccgttcgaattggcggcacccttacggtgggctgtgccgcgcggatttgtcattacgttattggtgatgaagatatattcgctgtagtgcgtagtgattccgtcgtcaccgtatccatagccgacacagcgatcgatccagacgtacttacttcctgttgcggtgtaatccttcgctgtaatatcgtaggtaggggccgatatgtcgaaacagtggagccccggattaataccctcgacttcccggacgatgccaaacttcacctgcgcaaaagtcaaacaactcgaatggatgccgccggtcgcacctacgccgccctgacgctccgggttccagtcgagcgacattccttggactacgatattacggttgccagacgccgggtccgcattaatgatgacccactcgctcgccggcgtgtcctcgtgcagctttagagtagtgacgcccatgccttggccgatcaaatacgtccatgacggaagcttgacgcctttaacgatgtatgtgccggcggataaattaagcctaaccttaccgtttccaatcgctttcttaaacgcttctgtactatcgttaacgcctgtcggatcggctccgtagtcatcaacgtttacatcgcgctcaattttgcgtaaaagcttgttatactctttgtcgagccgctctttcaatagaggcgcgatgtttccttccgcgtctacacgagcgtcaacgacctcttttacgtttgtaccgtccgcgttaaggatcagatttctgatacggttatacaggccgtcgatatatgtgcgcaaagaaaaaccgccatggtcgatttgatccgacgtgtgggcggtttttgcgttcttatgtgaggccagttccgtatacgatcctctaatatcatccgcaatgtcatcgaggttctggttgtggtcgttacgaaaaacacggtcccacgccgccccggcctttctgtacggaaatttcggcattgtattcctcctcgttatttattctctagcgcagtcaggcgcttgtttatagattcgagctgttgcgaaagtgtcgatatatccaccgtagccgtaccgaccttgatgcgttgcagctttgcgaagtcagatgcgctcattaagccgtcagtcgtttcggtagccagcgagacagaaacttggccgtcgggccccaatacgatactcgccagcttcacatagtccgatgagctcataagaccgtccgttgttgcgtttgcccggtcgtacgtaggaatcgtcagctttgtcggatcgtacccgtcttcgtaaatcgcgtcttttccgatggttatgtttccgcttatggcgctgcctttcactttcccagttgacgtatcgataagcttggagagcgtgctctgcgtacgacctaattttgcgacagttttactgatattcggccgcaattttccgaaagtaaaaacagacggtttattcggatttgaataagattcgacactgacaacgcgtagcttggtgcgtaagtcaaacggctctaatacgcaccacacgtaatcaccttttcggatgtcctgcattttcaaagcttcgacttccacatatgtcaaactgatagatatctcaatcttatcggtcagttctttttctagccgctgttcaagtttaccctcgtcctttgccgtgtaagagtcgtcgaatattggatttgcgtgtttaattccgtagattgcagccaaagggcttttgtattcagcttcgaccgcatatttccctgtcttgtcgtctttctttccgaagcccttgataaacgtttttatagaagaggtgtcgatttcctgtgtcggatcttttacatttactcgatcgcgaataacatagtctgtatctctcgctatctccttcgcgaagtacactttctttccaatacattcatattccgccgagtatttttctttaatatcgtttaacagtccgagcgagtatccattcccgaaatcctctacttcaaatgaatcaccaagaccatccggtacaacttcgtaagaatacccggagccttttaatgcgatatccagcatatcttcgaggtaaagttttttctttttccccgaagtctcgtacacgtaattctctccgaggtctgaaaatgatcggtgcagggccgtaatgtcgacctttagtctcttgcctccgatcggtacatagcgcgtctttcggatgacaaattcctcgtcttcataaaaaagagagccttcattctgaatcagcggaaaggagtgcgcgttccgatcggtctgtattactgatacatctaaagacctgccgttatcgatttcatctttctttgtcacgttaaagtccgttaaggcttcgacctgattagcaaggttttttacaatcaaactaggcatgacgcacctccctacgcgtaatagtggaatctaaaatcaaaggtgatctcaaaatccccgctcgttccgcttaactcaaaatcattccatccgggctcaagcgtaatgagtccgaaatttgtctgaccgaagatgctaacgttcccctttttcgcagtaaccccagaaatttgaatcgcttccttcgcggtagatttgcccgaaaacgtccatagatcgcccgtcgttctatttttgatcgacaatttgtcagacgcgcccttatacgtaattttcaaaggcatgtatctcggatctagccggacggctcccgcgttgaaaatacgaaaagtcttcgtcttgtgtttgtacgaagggatatcgtccgtcagcccttcgcctatctgccatttgttcacatcaaacgtaaacgcatccagtgtggtgccgactgattcgcaataagtcgaggcgctttggaaagtcagcgtaaagtcgccaaagctaccgattctgtcaggcgtgaatgatgcgcttagctcgactcgccatcgctttttcggcgtcgcttccgaaactaaaaagaactcctcctcgcgatgaagcgcgtgaaagagttccgcttgtaataaatgaaaatcaacgtcatccgctccgagcaagagacattcggcagtcagcgttcgggctccgaagtttttccccactcgaactaagccgtctctccccggaatcgtttcgtaatcgatatcgggagtgggcgaagcaatcttgaaactccgtacaaggaccgataaatcgcgagccatatcgattatgcgtccgtccttgtaaagtatccggaagttgctatccgtaatagggacaccggatggaggtgttgtatagacgcttgaaaatacgtcgatagatacctccggctcttcaacgacaaccggagccgggttgtttgtgtccggcgtagaaggagtggacggattcgaaggagacggggcggtgtcatacttcgtcaggttgtacgtttcaataattctgttaagctttgacgcgtaagacgggtccgttgcataaccggcgtctactagcgcagcagtcgccttcttgtagttcttctcgcctacgaccgccttatagtgattcgggtcccaactgacgccgtttacgtaaagcttcgcaaggtcttgcatcgactcataccacgttggatatttccgaaacttggcgtctacttgaacgttctttccgttaattacttcccacgttttcatgatgacgtattttccgttatactcgcctttcactccgaaaaggttctttccgttaactgcgaggccgctagtcccgtaggcactttctaagcacccctgcgcgataacaaggctggcgagaattttataattcacgaatatcttctgcgcgtccggtgcgattttcttaatgaagtccgtatttcccattcgaaatcacctcccgctccttagactttctatatcgaggccgtcttgttggatcgcactaatatgcggctcaattacatggccgagctcgtatccatctacgattatggaagcgccacccttcgtcttaatcgcctgctcaatcgaactaagcgcgcgaagcatatccgacgataagccggaatctcctccgaggcccgccgtatgccctgcgtctatcattcgcataagattcgcctgttgcgcttcagtaagcaccatttcgttacgcagggcccggatatctacttcgtggctcatcgggttagcgaattgagacgcgaggccgccgatgtgaagtttattgatctgtccgaggccgatgacgccgccagtgtggtaagtaccttcgttcccttttccacgacttacggcacgctccgtcttcatagaaacatccgaagtaattgtcgtgattcgtttcgtgatgtccttacttagagtagcgttcatcctttgggcttctgacgtaatatccgcgacccgacctcttgcggtacgaaggtttgcgatctcgtcgtcaattgctttaacagactttcgatattcatccgttttacgatcggccgcagttgtgttgtttttaagattcgccttagcatcttgaaggcgagcgatctccttatcgattactctcacgccttcgccctttttggcgtttaagcctacttgacggagctcaaggtcgatcattttctgattaacgacatctaactgattgatattctcgcgagtcttttggagctcttgattcttagagctcaagttttccatatttgtagaaaactgttcacgtaatctctgtaactttgtttgctctaagttgaggtcgttttccgccattgccacccgtgctgtatctttagcctctttagctgccgccaattcgctctctttctccgctacaacttgcaattgatcagatacctgctgctctaaatcggagcgctctctcgtcaatgcattaactttttcttttaatcgcgcttcttcggctatatatttagacatattggcctcagctttagccctttgggtttctagatccaaccggagttcctcggctttttctttgttaagacgctttaatgcgtccgtgttctttgctgcggcattgccttgctcgctgatagcggccgcagtgtccggagcttttgcgataatcttatcgttcagatctaagtagcgattaaattcctcgtttgtaagacctgattttttccgcagctcttcctgttcttccttcatccgtttaatagaattggcatccgtctccgttttaattcgatcattcaaatcgagatagtaaacaaattcatcagcagtcagcttcgttttattttgaagtttatcgaactctttcgttaagctgctgatagagtctatttccttctgcttcgactcggctgcctctaaactaacggtgttcatctgatcgtatccagctttcaccccgacaagtgctcccgctaataaagagagcccggtaatcacccatccggtcggccccatcgcaacaaacaaaccgcgtactgcgattccgagtttcaccatggacgatgctaccaacgccaccgctgctgccgcgcccgccatttcgaggcccgtcgtaatgatccccggattcagttcgctaaggaactcgaccactttcgtaccggtttcgacaatttttcggaaagtaggtaaaaactcgttaccgatcgcgattccaaggccatcgagcgcagacgtaaactgttcgaatgaccctttgaggttatccatctgcgttttcgctactttgtccgcagtcccgccggcttccttcagcgacttcgaataattgcgcagtcccttttctccgacgcccaaaagcgtaacgaatccggaagccgcttcaactccgacgagctgtgccgctgctgccgttttctgtgctgacgtcatcccttcgaattgcttcgaaatatggccgacgagttccggtatcggttttagatttccgtgcgcgtcctttacttcgatgccgtactttttcatcgctttggccgactggcctaccggattcgtaaggtgtaagagtgacgcacgaagcgccgtacccgccatcgatccctgaataccagcgtctgacattttcgcaacggccgtcgcagtatcttcgatagaatatccgagagagtgcgcgacaggggcgacgaatttcattgcatccagtttgttatcctaccggctctttatccggtagttcttacggtttcccgcaagctcagactatatcttcacccgcgccaaagacgttagggtgccacgcgctcgtgggtgtttcatcatagctaatacgccgtagactacttcacctagtcgttacacgttccgcatgtttcctatgcggcttcgctcggtattctcataccatttgaaagtgacttagagttcaccgaattcacgtggtgttacgcagcttgttcccaagcagccgggcaattttgtttacccaattgcggcaaatccgtattcgccgtcgtcatcacttttacgagtacgtcaacggcgtgcccggaatcttccgctttaatgccaaagccggtcatgatattcgaaacgatatccgctgaacgtccgagcccttcgccggaagccgcagccaagttaagcacggccggcaacgatccgacttgcgctttaacgctaaagcccgccatcgcaaggtattgaagaccctcggccgcctctactgcggtgtattttgtttcggcgcccatcttagccgcgatgttcttcagatcttcgaagtcctgaccggtcgcgccgctgatcgctttaactcgcgacatggcctcctcgaagtcagccgcctttttgacggaaacgccgataccggctacgactgcgcctccgactgcaagcgaagccttttggatgagccccatttgcttcgagagattcgcggatgaacggcccatttgatccatatcgtttcgagcttgctgagatcgtcgggaccagtccgccatgtctaatacgagacgcgcccggatttctccgactgttgttccggccatctatttgcctcctttccgaaaattcccctgtaaagcccgtagttgttcgaatttctcacggtcgaatttcacttcaggtcgaagtcctgccgcccgaatcaacgtattcatgagctgtttatactcgtcgtcctcacttgcccgactattcgtcgcgagaagtacgcgaatgtcctctatacgccttaccgcgccttgtttcgtcttggcgcgtacaaatttcggtatgtctaccatataaaactcgttttctatctgacgctgcgtgacgcctaaactgatagccgcctcgattagataatcgtcaatcgtatatggatcgccctcttcgtctacttttcgagtttcggaagaaggctcttcacgttttttgcttgcgaatcgagacggttccttttgacagtcaacgtgatgtactcgatgatttcatccgtaccgacttcttctcgaatgtactcggcatctacgccgctcaataatgatgtaatctcgacgatctcatccatgccgacctcaaccgcgcttactaaatacgagtagaaatccgttttaggcgcgctaaagacttccagaatgagaaatggaattttatcgagtgtcgcgaaaagctgtttccacttggccggagtaagtttcgcaacctcgaccggatacttaccgagctggatcgaatcagtctcctgtttctttttgaaaatgttcatgcgactctcctttcgttaattaaaaagacaccgcctctcgacgatgcctttcgttcgttattcgctaccagagccagaagaggtaccggccgtttcatcgcccataataaaaagatcgccttctcccatcgtgtccggataaccggtaaacgttaggttagcgatcctctcattatcggaatcataggtatactcgatgtcagtcgacgcaccagctaacggaatcgtgagccagtcgttggccgtcgcttctggatctgtcggcttaattcgtaaaggcttcgcgtccttcagcaagtcatatccggctttaccgctgactacaagcttctttttgtctccgtcagacacgtacttactgttcggaaccgccttatgaatcttttctaaatcatagatcgcaaacggtacggtacattcgcaagttccgccctttgtccgtgagcctacaatcgagtcaccgtattggtcgaccgttgtatcctgcttagacatctgcgccttaaaaacgatgccgcccttcgtgatgtcaaacgtcaccatatccttaccctcgccgtactcgacgattgcggggccgataggaacttgaatcgttttaattccagccatccgttttcctcctttatttttgcattaaaaaagcgcccggtcggggcgcactacacaatcgaaatttaacgagtattggggacgatcattgtcgtcgtatccgataaataacggcaccgaattggccgcacggataacaacgattgagctattaccgataaacacttcacggagattcgttaacgcttcctgaagctgatacgctttctcttcgcagcctgcatcgcccctcgcctttcctcgtacgattatttgaaacgacggctgactctttccggtccattgagacggaggaaacccgcccgtaaatcgcacataagtgcattcatctgctgcatcccgcgggaatccgtttgcgtaataaacgccgtcaacccgcgactgtataaacgagattaattcggttatcttcaacgattatcacaactcccttctcaccgcgtctgctacgtgattaatgtatttctgcgattcacctttcagcggacgttctaggtacttatttccgaccggataaccgttgatgccgcctgcacctgccgaaactggtccgaggttgtaatccgcctcgtgcgtccatagcgcatagttaaagcctttatcgacggcccggaacgatacttcaccgatcagactatcgcgctttaacgtaaccttcttcttcatgcctcgacggagcgtagctttgtcaatcggagcgatattttgcgcaagtctagcgaggtcatccgtgttatcatgcatcgctgtctttgctgcctgctcaacggctacctctcggctatccaataacgatagaaaatcgccagcatccaacgtaaaactcatacgattacctcggtcagaatcggcttaccgctgacatgccgtttcacatttatttccttcggtttacgttcaatagtttcgcccagctcgttcgtgaacgcgagtgtatccgtatacctgatgtcggctaatttatcgaccaatatacgcgccgtggctacgacttcctcgctcttcacaacgccggaagaacgtgaattcgcaatagtagatccttcgtcgattcggcacttaatttcgaacggcttgacgctcacagggtttccccacacgtctatttcatctgaagcacgagtaacggtcacggcctgacgcattggtatgatcgccaattacatcaccgtcgcttttacggtccggccgctaagtttcacgtcgttcgcttcttcgatcaggtcgattgtctttttcggtataagagactcatcgtcagctcgaagcgtttccttatacgtaaacgacccgacgccggtgattgagtaagacgcgatgccgtgcttattcaggcggttcgtatcgttataagcagtcgcaagcacattcgtaaactcgtaaactgcgtcgtcaggaatgacgtacttacgaaactttcgagctaagacgtcctcggctacgtttagtacacgctgctgctttgcgtcgtcatagtcgttccaatcctcattatcgattgtcattcggttaatatattcgtttgcagcttccacgcttaaagccatacgcacagcccccttattttccggaggacttacgtgcaggctttttcggcgccttagcctccggggtgatgtctgtatatccgaaattatttacgagatcgtcccgtacttctttcgactcgatttcagcaacgccggaagaaaaagaaacacccgcggtaacgccgttatagtacttatttggggtttgaattttatatttcattatctccctccttaaaagaataggacggggaatattccgtcctattcgcaaatcgattagattttacgctgcacacctttaagtcgagccgcagaagttgagttctgaacgactaatccagcgtagaattcaatacgagtacgataagccggtttttcttgtaactcaccaagatcgtaaacttgcacgccgccattagtaataccagcaacaccgtcggcctcgtcaactcggagagcgtagatagatccagtgtcctcagaagtcccctgtgtttcactaaatccaagaatttcagcattgtttgtatctttaccgatagtacggataggtacgccgccatacattaatacagggttcccaaaagcatcgtaaccctctgtttcaaaatacccgttttcagcttggataagagcctttaaatttcttctcatttccttagacatcagcaagacgttgggacctccgtcaactgcgtctagcaactcgtcaagcattgagagtgtcaaagtattaccgttctcacctgcatccacaaccgttgtagtaagttttttcagtccgtcaaacccgttcggattaactcctacatctccatcaatgaagttcttttcaaagaagcgcgcaaatgcttttacttttagagaagtttgaaccatccgctgatcgttaatattgcttcgtgtttgagcgatgaaacggtcgacgtccacgtctccaccaagaatcgctaatcgtgcgatttggttatttactgtacctgagctttctttataagcttgatttaccgcacgaaaatcgataccgggcaatgcgccttcgcggttatatgagaacgcattcccttccatttcgataaaaggtaatatttccaacgctgccgagttttgaacgtactctgtaataacgccccttttcagtgcgtcttgggttagttttgctgattccactaatgagattgccatctaactaaacactcctttggtttttattaggctactgatttgcgttattaccgtagccccttcttataagatctcgtgatgataggcttgacagatgctcgcttgtatccggctgtggattactcggcttacctaacgatgacttaactttcgaaacaaataggcctttttcttccgccttcgaaacccaatccagtcgagtctcgataggtctgtcgttagggatcagttcgtgaaactcttctgggatactcgcgattttggagtcgaaaagcttggttaacgttccttctagggcgtcccttcgtgcttcgacttcggcatatttttctaaagccgagctatccgtctttaccttgtcttctaacgcagttacttgggcttttaaatcctcgtaatctgcatacttcttcttctcgcgatcaactcgttctgctacgattctgttaagctcttcctgagtgaacgtcttttccaccggcggttcttcctctgatctcgtgtccgctttaggttcagcgagctcgctcgatacctcttcagatgaatccgagaaaaactgaagattcttcaaatgaagataatctaatgcgctcataaagtccctccaccgcttaaagcccgtcggctattgaatgatgcagccgtttcttttaacgtcataacgttcggacaaaataaaaaagcgctacacggcgcttgatgggtttcttattgtagaaattacgtgcttacaacgcgggtgaaatatctccccggtcgctttgagttcgtcatatgtcggataattgccgggagcatcgtcagtcagcttaatgatttgtccctcgtggagacggcacagatccttcgctccgtgcgacgaaatttgcgcataatacgctccgcgacttaccgcctcattcgtatgggcctcccgataggtttccatcatttttgtacggacgaccatatccgcatacacttccggcttccatcgatttcccctcgcgtcgataatgccagtactcaccgaagctcgaagagacttgcgtaccagatccgttatgctgcgccgtccgttcgtccctttggtcatattaagacgcatcgaatccgacacggctttcctcacggcggcccgcgtcttcctatcgacgttttgcgtaatcgctaataaatccgactgcgtatccgctacagcagccgcaaccatgtactcgtttacctcgttaaaagaaacgatcttttccgcgtccgccaccgtctttgctacgtccagagcgaccagtgcccgcgcaataccatcggtggccgccttcggaacattctttttgacccatgcggaagatttttcgtctaaatcgctgaggatctcgctaatagatttcaaggtcgccaacgcgttagcccttcgaaaattatcgaggtcaattcgttcaagctccgccaagatgtctcgtaccgcttcctgatagtacccggcaagtcgattcgtctgataatcgtattgaggctcaggagaacgaggcattaactatcgtcctcctcttcgatttcctctttatcctcgtccaaagggctcttttccggttcttccttgttgaaaatcgatccgtcaacaaagccactcgtcgttttttcgtcttcttcaatgcggcgaatgatttcgtcagctttttcgtcgtccacgtcgtcctgctgcttaatggctccgcgaacgtcaatcgtaggcttgccgcctgtacgtatttgcataatctcggcgagctctttttcattcttcggaaggccgtcgctccaaatagcctttggatatactgcctcttccacgtttaaatcgcctatttttttatccaacaacatacacgtccacaatgcatctcttattgccttatcataatgcgtccgaacacgctttaccttcgaaagaatcggcatgaagcgagctttgatcgccgcgccgtctgtgtgcgacgtgcctgttccgcctgaattgtctccggagatcgtcgtgccgaataaccactgcggcgtctcggccatttgaaagacgttactgaagaggacgtcaagctctttgaacgctgcgtcaagctgcgcctgccaaaccatatagcccggagtcgtatcgtctttagtaaccggaatgtacttgccgccaaactgaactgaatctccggacccttctaaatccgggccgtacgcggtcgggtcgctgtgtttccataggatgtaatcaatctgcaccagacggtcattaattgccgagagaacagtttcgagcttctctataacaccgataccgaaaagcgaatcatcgacacttttataaggtgcgtgaaaaaccggaatgtgcgtcaagcctgtttcttcgtagactgttccgccctcgttcggaatcagctcacctatacggaacacttggataggcgtacctgtagaattgtcatacccattttcgtagagacggaatttagagtataaaatatatccggggatatgcctttcaacaagcaagtatgggatctctgtagtttcggtttctacccactggacttgtgctatatttagtgcttttaatgattttacgttgctgtcagatacttcagggaaaacacaactagcattaacgtgttcaatgattggttccatctctacaccttccggcgcgtccccatcgattaagccaagcttcttaacttccgaaaagtcttgcctatagccatatcgaactttgaaccaagcgtcgcctctatatccgctagaaatagcactctcatgaattaattgattaatatcgttttcttcaacgtatttgttgagcgctctttgttctttacttgtatccggtttgcccgtctcaaaacgaacaggctcccctaccagcaagtcggcaggttttgtgacgagaatatctgctaaattgattgcaatatagagcttctcaagttggtctgcttgtggagatgttttaagaatttgtgttgccctttcgtagacatccctttgccgcccttcaaagaacttctttgctcgtttgtatttcgctagcctttcaattgaatcagcaggcggaaactgcgcaccttcacggataattccatacgttttgatatggagaccttcgtcaggggcatggtcacgatgtttaaaccatcctaaaacacccatttacgctattcctcctctccgataatgtcagccagttcttcgagttccttctcgatatcttcgttactgcgggcgcctccgtctgcttcattggtcgttatctgacgatcggtcaacaatccgtgacgacgcatgaacaagtcgatagctttaactgaaggctgcggtccttttatcagctttaggagctgcccgtatacttcggaccggtgcccggaaagcatgtcgtccgctaataggttcatgtattcgatgaataccggattttgaaaccgccatcgatagagcgtcatgcgacttacaccgatttcttcggccaacgcgtcctgactttgtttgttcccgtcttcgggcgtgacttcattgctcgcaacgacttgcgctgccttacgttgctgaagcgttagttttgcttcaagctctttcatacgcgacattttatcgcctcctttcttatagccatcccggcttcttcactagccttgttttcggcctgaatacggattcgagtgcctgttgaagcgcgtcgagtgaatcaacgtaatcgccgaaaggatattgcgccatctgatcgagaagcatcgtatgcctatcgttcagaattagcgttttgttatgtagcatcggctccatcgactgaatacgctcgtctttcgaagacttatgcgatttcacatcgttcacgcggcacgtataaagaccttcctgccggacccgctcctgaagctgacgatagtattcgtgttgcgcgtttattgtttcgacgttgaaggaacgatgtcggtattgtttgatcttccgaataatgacgtcaatgtatacgtgcgccggttccttcgacgcgtattcatcgagtacgaaaatgtatccggtcggctcgtgtttgccgagcgtaataaccgagttatagcaagaccgcgcattcttaccctgcgcgatatcccacgcgccaacaattagaagatcactgaccggtattttcaattcgttgtacacgacgtatgctgttccgttctcgtgataatagtggtaataagcgtagttatccgggaagaagaactgctcgtcttcgctgaaagccaagtttcggaattccgaattgtatgcgcgcgttcccatgtttactttctcgtgcatgagctcgcgataggtccagcgccaaggccacgccagttcgacgccgtcctccaacgcctctttatgcgcttcgtagaattcgtcagcctcttcgatcgtttctgctctcgcatagacctcgcagtatttgtcccacaattccggatgcgtcggctcacttatgatcgctccgtgaaagctcgccttgaaatccttacgcttcagaacgtggttaagaagcccggtcgccgaaaccattgtcccgactaacacgattgccgtcgccttggacccgatcggaacgacgacggagttaaaccaatgaacgagcttttcacgcgcttccttggttccttcgttgtttgtcgatgacgggtcgtcaattattacgagatccggccggacagctccgtgacgcttaccgcgaagctgcttaccggaggatgacgactcaataaggatattcgtcgttgtaatgaacgcctcttcgttatccttttcgttgcggctggccgactcgtgcatcataggcccgaagtcttcccgcagctttgcgttaaacttcatttgcttgttaacccatccgatgagctttttcgagagcgaatccgtctctgatataacgaggatatatttgcgctttctataagccgcctgatgtaacggcaaagcgttcgaaaacattccggattttgagtggccccgggcagccgcgattgcaagccgcgcgttccttttctcttcgttgacgtaatcgcaaagctcaaaaaactcttcgtggatcttcgcgatatcttcaatgccgtcgtgaggcgtcccgtcatcagagttccttacgacattatcctcgttttccggatttaggccgtcgctcaaatactcgtaggtgaaatatgcgatatccacctcagcacgatgaacacgcttcagcttaattaattcggccttgttcttccggaacatatcgatatggtagtcggtggcttttttcgctttaatgagggccgctaatcggcgcacactctcgatcaataagtcgatacgctcccgccgctcttcacgatccaaccattttccgttaatatacgccaaattatcgccctcctttcgcttgactttcgttattattttcgttaatatgaatttaacatattgagaacggagtgaaattcgaatgaacgaagtccaaccgattagagaaaaacgccaaataaacgcaataaaaaaggcccttcgcgggcgtgatctgcttttatttacgctcggcattaattccggcctacgtatttccgatatactcgcactcaaagtcggtgatgtgcgcggaaaggacttcgttgcgattacggaagggaaaacgaagaagtcaaaacgtttcttcttcaatgccgcaatcaagaaagccgttgctgacctgattccggccgaagcaaacgacgacgactggcttttcccttctcggaaaggttcgaaagctattacccgcgtccgtgcttacgggattcttaacgaagctattgagcgcgcaggcctttcggagaagctcggcacaatcggctgccattcgttgcgtaagactttcggctaccacgcgtacaagaacggcacagatcttacgctacttcaatcgattttcaaccattcgaagcagtcggtcacgttgcggtatatcggaatcaatcaggaccggatcgacgaagtatacgcgaatgttaatctataagacgacgggcgccccaacgtttgagccgtagccaacgtaggtgtgctcgtcttttttcgtacacgccgactgcggctgcgacttcttcctgccgcttccgtatttctgctccataccgcagcagacacatcgacttgcaatcgcatacttcgaaatggcgcgaacaattagacggggcgcagtgggattccgtttgcttattcgtcataggcgatcgcctccgtttaactttatccacttcgtcttcttcgtcggatgcgtgtctttatatccgatatttctgacgacctctcgctcccaccgcttctctcgatctgttgtaagttccctgtacgctactataaccttagttggccgcgttcctttatgttgccaacctacggccgcctgacctactgctaaggctcggaaataaatgcgcttattgtcgatatctctaaaaatattttcgagaagtctggcttgctccggtgtatctacgaccatcactataaattccatcaccacgaagctccatttccgcatacacacttcgcctgctcctgccgcaattcagccagcgcttgcgtcgccgcctttgcttcgcgttgaagagctttaaggccggtgatggcttcggatacctctacgcttacctttacgtttacgtctccgatctttccatttttttcgaaattcggattatgatacccgaggatgactccgttcctgctatccatttctattgattcgcgtttatccgccattcacatcgtctccttttcgtttctcaaagcgcgcttcatcgtgaaacctgcttttacaggggcggcagggatcgaacctgcccaaataatccgccaccgaggaacatgcgcccctatttgccacaccgaccggggtccgcattgttaagaggcgtgtcggtgggtgcgctagcgtcaccggaaggctcgtaagcacattccggccgatcggtaaaacgcaagcacaaaaagacctccgccgtagggtgcggaagcctcgttctgattgcggttaattatcgcttactttttcgtaagtcttttcgaaaatgtccggcttgcacgggtaaagttcgtcctcaatgccccgaataatataatcgcctacttgcgcaatgacttcgctactcggcgttataattttgagtctattggatgccggatacacaaagcaccgttctttgtacgcctcatccccgataaatttccgtagattatctatcgagtcctgtgtaaccccgccccattttagcgcttctatttccgcggcctttctacgatatttcgtcatccttccgtcctcctttcgaaatcgcacgaaagtagcgtttctgaccactaccctatcgaatactctccggccggattaaaacggctgtggcgtgcttatttcgtggaataattgtattctatttcgtctgcgttgcaatcctcgcaataaaagtgcgcagccatgtcgaagtttccgaaagctacaacgttctttgatccgcaacacttacatatgatttcgaaattttccagcggtagcacctccgtttagttgacgccccgagttcgaaaaattgtgcgcaagttccggacagcagttgcgccggtatttttgggggcggttgggggcccggcgtttccgcgattcttcgtttgggtcatcgtatattaaatacatatttatgaataacgaatttaacagaagtaaattgagttacattcgaatcaatagacaaacgttgatatgataacgttcgtcatcgtttactcatcgcaattaaacgtacattgtttatgcattcgagaacccgcgccacgcctgcaccctgccgcatgccctgtgccgtatgctatgtataggatcgtgcatattgcgttggtcattcggtttgaccccgtgagtttcggaagggctcatcctccggcggtggctcgttgctgttcgcctcatcacgcatcgcaacaggacgcctctccgccaccttccttcctatataactatacgtatgcctatacggtgttacatatagcgtatgtgtgccggctgtaccccgcctgcctatcgctaggttatacggtatgttacgtccttctattacgtatagacagctaaggcgtcaatcactctatagggacttaggctgcgacactgttctcgaccttctctgaaatagtggcgaacttcctcagatataatgattgccgatgccttggaagttgcttgatatatctgttcacatgcataagtcgagtcttaccgtatactctgtcttcgtcaggaccgattaagtagacgattataaggtttcgacaaacggcgttgtactcacgtaaggtaggagattgacagttaataacacgagagtggttgagtttagcatcagcccaaactccgttcttaaaagtaaagtccggtctgcgttttccatggctcattcgtttgtaagcgatccccagttcttttaaaagaccggatagaacgcgctcaaactcatgcccacacttaacggatgtaagtctgttctttttgatggagctataaggaataccggctgcctccaccgcgtgtgcatactcaccgaatagcgttctgcatcttatcattaacgagtcatcagtagattttatcgcattgtaatttaaagggagcccttctgtatgcctgcgttgtatctcattaattacagactcctctgtcggatactttctggaacctctatatgaatactttgccatatgcgttctcctacctttcgcgtatttttcctaccggttaaggtgcgatgcggctcgcacgtggtaggccgtttcctgccggcagctaatcgacagttgagccgcaaacacaaaaaaggcgaccgacaatatgccgatcgctttcgttctgtctgcggaaacacaaacaaacttaataaaattcaaaatggggaagaggaagaaaaaacgatgaataatatagaatgtgtttatcgattccttcctctcttaatacagatataatccacttgaaacatatgtttttaagtttaagaggaattaaatttcataacgtaaggcagcatattaagcgctttaacaagtacctttcaagataaaaatatttcatccagtaaaaataactgaacaatatctatttaatacatagcgcccctacgtcgctttgctcctacgggtcgcggatattatttattaagtaccttttcgcgattaaataaataagaatttaatatccccgccggatgagcgtaagcgaatggaaggcggaatgtctaaacggttttattcagtatagatatagaacgttttgcgtaaattccacaccaaaaacagcgttcagtcttagagccgcaagggatacagcgatcgtgtgaacggtgcaaaaaaaggggtgtatctcggctttttggtgcaaaaaaaggggtgtattttcacccctcgtaagatttcgaagtaaataacgcatctaacgttccgtccggctgtcctgacttccgataaaaaatgtacggatttagcaccgttaacttttcgcgactgtccttcgctcggtgccatacgccaacgactccggctttccttaatctaaccagcgtctcgcgcgctttcttttccgacataccaacgagctccccgatctgcttttcgttaaggaaccgaatctctcccgaagcacaaaacggatcgttacatatcatattcgtctctaaatgaacgttagggagcaacttgtatacgaagccaaggtccgcagcctttacgtcgaggcatttaacggtagaaaagaacgtcttaatcatgctttgtgtctcggcgccggcctttccccgtaggtgataccgagggtttaccgtaaagcagccgtcttcttcgtatatgatctctttatccttcagctcggtaacgaccgcctttactgttcgcgggctcacctttagtattttcgctaatgctgcgcgtttggccggctctttctttccgtctaggattacatttgtttcatactcaatatacggctgcagcataacgacgtagccgcaatacgtattcgatagctcgcttgttacttcgcggatatgcttcatatgggtaagcgaaaagtgtctcgtatcccttcctcgtttttgcatcttcttatatgcttcgtcctggttgcgatgtcttatcgtatagtccgttaaaacctcgcccgtagattgatcgacaactaatttagctcccattttatagcctcccgtatttgatcgtcacattttgtgacgaacgatttaattagcgtaaattgcgctgaacaagccgacgggcccgcctaagaagcgaagccgccgcccttgaatgcgatataacctagcggaccctgccgcccacgtttccgccatgctcggtacttctcggagcacatagatttcactttgccgcggtaatcgacgttatcgtagtatccgcgtgtctgtaggttaaagcgtaagtattcgtcgaggtagcacgtcacagatcggccgtttgtgtagtcgagatatatgcggccgcataccgggcactgtttccaccgattggcccggacccatttaaagtcgcgccaagttagcccgtagtctggcgcattgttttcgaggatttgatctaacgtgtcacggtagtctttaagatcctcgcgcagctcgtcgaaagccgcgcggaaatcttcgatactatcaaaacggtcgcctaacgtgacactgaattcatacgatatatttgagtaaaaacaacgcttccactccgggtctttgctttcaatcgcaggaacaacgggtgatttcggcatgtcttttcctcccctatttgtataatttcgtccagccttctcggaaagtaccgttcttttcgtcttgggatacggacctctttcgtccggtaacggttccttgtcgaacttgattccaacccggcgcagcatggttgtctttgccttcgtctaccaagcttaggccccccaagcgtctgtccatctgttcgagctgtgtttcggtataaaacggatagcgctctacgtaatccggaaagtctctcggaaacatcggcggaccctcttcctgctgccgcactgtttcacacgcaagggaatcgcgttgcgctttatcgcccaaccaacgcagtaatgcgttttgaacctcgcgagtaaacgagtataccggggcttctccggcgcctacggcgtttaaccactcgccgagtacgtcaggacctttagctttgaacggcttatatggcgggagtttcttcgctctataaccgagcatgactgccgcgacgccttccggagctgtcatacgtatttcgcgcgcctcgctcgtcttaattccgagcagctttttcacgtccctgtccggcagttctaaaaagtagtgaagtgcaataacttttcgttctattccatcgagcacgtccgtatctaacgcggttctcaggtcacttagcattgtgaccgttgcttcgtccgttcgcccctcgatttggttgtaaatcgaaagtaggcgaatgatgccgtcctcgtcgtaaaggtattcatcctctcgttgcgttatctttgtgtgatagttcgatcccttccccatatcgctgcctcccttttaaaaattccgtttgccaaccgcgagtttttgtggtatagttaaaatgggtaataatacagaaaatcaaattaataataaaataaaacctctaaaatcaaccattagccaagcttttcaaaagcttatatcttctcacaaactccagaaaatcatctgttacttcaaaatccatcgctaaaaccctttctgcttttgtagaaactgctcttgttccgttttcgatcatacttacataggtaggacttataccgaggtatttagcaaactgtgcttgtgtcatccccttgaacagccgtataagtttaaaattttcgtttgatatattcattacacacactccctaacttttttaaacaaactacacaactagatcaaaataaattagcaagggacttcacaatccctcactaattacacataaagtccacttgaaatgggtgttttttactgatcgttaacaagatttttgatttcgtttatcgtgtcatcgatcgctttctcgccgtcataatagagagttattgcgttatcacataactcatgatcgcggcggtctagccctactgcataaaaagctaacacttcggtatctagtagaaaacggaaggtatccacagcttcacaatccttcaaagcttttgtagccaataagatgcgcttaataaaatcgaagtctccgttgctagccgtccagtcagcgtttcttagcatcgactgaacaatgcccatgttgagcgcttcagctttaatcggaaactctaataaagaaacttcataatcggttttgttgatgccgattccttttaaaacctcattgactatagagtctaattgatcgcctgcgtcaacgccttcttctttcatagataaatgaatcgctctgtatgcgcctaagaaatcttgtagaacttgctcatattctccctgatgagcagtaaaatagactgcttcctcaacgcttgggacgttctcccaatcgccgttaactgcggcttcgagtgcgtcaaccataacttcgaagctaacattatcgcattctgtttcgtacagaagatcgtaaataatctcaggagcgccatctgttccgaacaacgcgtcgtccaacaaaaatgtgcggccgcctgcaagatcaatagacgcatccctaccgaacaccttctcaaagtcacgttcttttttataatcgtttcgacggccgtctaagatcacagtgataaggtttctttcgactttagaaaatttcttcatacaaacatccccttattttgagttttagagataaaaatccctctaatatacaacgggtatatacccactatttttgccacatcctaaaaataaccaaaaattccgaatcccttgttacatataggattgaggcgcaaaaaatttttttattctctctatcagttgcataaataacctcgaaactggacgcctacattatcgactttttcaagccgcacaatttagcaaaagatttccttgatctcttcctcccctcattactaactgcgtattaacttacgggctggcaagatttttctgctaatctttcatcattcataagtaaaaccccatcgtagtgttcgaatttgcgtcatccaaagtgaaactttttacaaccgataatatgcacctagtgtaaatgtcgcgcaaatttactcccttccatacataactgcgaaggtacttttaaacacggacagatttaagccggcgtttaaccggcttttattgcggaacctcaatcaattaacttttccggaacatcgtgaacggttccccgctgtccctcgatcgtatatatccgctcttcgtgctgccggccgattaccttaccggtcatggcttcggctgataaccacgtcaagccgtccgtcttaacgccccaaaaacgtacagtttcgcctactttatacatggccttctcctcccgtgaaaaacatccgcatgaactgcgcgacactcatatctgtaattgtgcggccgtcgagtttctttagagccgccgtagccttagcgaactcaaatgagaacgattccgggtgtgcatcgtcgtacaagtggtatccgtcattcttttgcgttaggccgcccgtgtcgtaaaacgcaaacctgccgccgccccacgcatcaaagtcgcacaatgctaccgtatccgctgtgattaaataggcgtcatgggtttctttatagggaaaatccgccgatccgtgtcggaccagatgcaccttctgcgcttggaactggctcatgccggctgcgcctcctttccgtacttacctgccaagaacaacataagctcgcccgctgacatggctgcgatctcctctaagctcggaacagatccgctttccggcaccgtatacgctacgtcttcgtgaacttcagagaaccacccgatttccggtccgtttaagccttcatacagtgagtagaggcagactagttgctcgttttcctcagcatttgtcatggtgattacgtgaccattcccgatattaactgcgtcaatctcttcttcaaaacgctttccgtcctcgaccaaccaaagatgatttacttttactttctccatttcgcttccccctcgaattttagttccgtccgcaatcttagatataaggtacaagaacacgctctaaatcagtccgttcttttctgaatgctgatctatcttcgtgcagtcgcttattatctgcgcaaaggtccgctaaacggctgtttaacgccggggcttcttcggtacctgcgtcaattaattcgaagcgcactttagcgatttcgtaactattttcgtgaaaagcgagttcagcttcgcaccatttgcggtggatctcgtctcttctcgcgatcagagtctttttagtcgattccttaagcgattggcgtacctcttccgagagattttgcggtgactgtagcgcgtagtcaatggggaaaacgtccaagatggtgccattctcagcgataacaaggcgcactctttctttgtaattatcgtaaacggcttggctgccgcttgtagagtcgagcgcccaaacgaacgcggcgccttgtgcgtatttaattaaggcgttcggtgcctgcgcatttgtaagactgagacgagctgccgcgttttttactgctgatcgagaaacgttatatttattcattatcgaaccctccgaagttgttgttttgagcgtcggaatctgttttccaaaccgcccataccatgcagcctaagataaacactacgattactgcggatattgaaaatatccatgtgaaatcgactggcatatcattgacctccattcaatttcccgaaggtgttcgcatactgttcgccttgtaaaatccggtgacaacggataaaatacaaaataagtaacaaaaccttcgggttcttttggttgcttaaaaagctgttatgtgcaagtaacagcgattgacaaatacgattactccgccaagagtgtaaatgtcgtgtttgttgtatcttctaactgagatttacgggtcgcccgcgccaacgggtcggcctttttgttatgcgttcgccaaaacgcgtttgcctttaagaaaaatataccactacttcacaaaagaatttgaattttaagccatttcatattttttaaatttccctgaattttaggattagcccgccgacaagcgccagcgggcaaaagcattaggctccgggattaagctcagctactttaaactcgtcttttgcactgtttgttacaggttgttctttttggctaagatacccggctgataccaacacgatcccagtgattaaaacagctaataacttctttttcaaaactaatctccaccttatcaattaattttatcgactttaaagcctcaacttgctcaccgtcgacgccaaatcgagcaagatcatcggcaattaaataagcaaataaaaaattctttttactgaagaaatagcttataccttcatagatcgatgacagactattttttgatataaaaccaaagtattttatgaaatcagcctcatctcgtaatgtcatattcattaagaagcgcttcatctcaggaatagacatcccttctcgaacatcgaaatacagtttagctagttcaaagtttgttttagtttcagcgataagatcagttctttcgattttgctcatcgcctgataactgcgttcaagatacctcaaacataaagatttattgctcagtaagtaagacatcccaagcccgtaatacccatccgatagtgctttgtagcttatattggagtgaattaaaatttccgcgtaacgtcgcgctgcttcaaaattagagaagtgaagatgtaccggcatcataacctcggataatctgtaagtatagcattgcttaaaaaaagatcttctgccatttcctagtttttgaatttctttctcgatcttcttagctctcgttaatatcccaaggaagtcctttttgtagtaaagcatgtagcagttatagatattcactatgatcgacaagcttttgtccttcgacgttcggacacttttaagctcattatatagatcgagaaacggaatctttcccctcataaaactgtagattaatccatacacactgcgatacaaatctaggtattcatcatttttcgttttacacaacaactctccgagaagatccacgtccctcttaaccgccgcatactcgaaagcatgtttaagtgattcggtcgtgaagagcacctgacaccatttcctcatgacatcgtgatactcagatcctttacaaacttgcgctatcttaagcattgaaatgaatccgatggtatcagactctttcaaatcagacagagtagttcctgatatcccaaccatttctgctacttttgtcggttttagatcgctatcttcaatcaaattgaaaatttcgtccgataaacttttcaaacccttccccttcttcctccaaattattgtgcatccagaaacgaatagaaaaacagacggcaatagtttataatttccttcgtaaagcccgataaaagctttgcggaggtgtttaatcggtgaagtacagaccgggacggtgtctacttcgcgacttgttagtcgaatgtggctttacacaaacgatgcttgcggacaaaagtggttacgataagagtcatatctctaagtacgtacagggtaaacaagaaatgactctcggaactgctcgaacgtttgcgcagatcttaaactgcaccatagatgatctgtacgaatggattccgcaagaatagacagtcgctggcgggattaagcatcacccgtcaaccgagaagtggcttacataagccacccgaattttcacccgtacaagtgttcccttgttgttcactatattacctgactattgagaatttttccgtcgaaatatgtcgaaagtcacaaagtttttagaggtaattgttgacaaacgagtctaaactacttgaaaagtctgccgatggcttttccggccgccctccggacaattctttgaccgattttcccgcgtttgactgcgttgacatcaccgagaattcgcgcaatcaggtaaagtgtactacgaatattcatgaaaccaccgcctttttcttcgctttcctttcggcaaccgtgagcatgaattcaagaaccgacatactcgcgagcttttggatcgggacatcggagagccaaccgtcgtcgtatatatcatgtaaaacccggtcattatctccgatttcccaagcgccatgatcgccagccatttcataaagcataataccgcaaccctcttcgtagccaatcgccaagttaccgcctacgtgaacgagctgtttgtccttccgcaaatcttttccttctcctgcgaaattatatataacgtactcagccggaataaggctgtttttattgataacgtttgtcataacggatcatcctttcgtttagtgacgtccgacgacttcgctgccgccgaacgtcgttttgtttttcatcgggacagtaatttccacacgatcaaaccgcaatatacgaccgctgtgccaagtccgatgaagtctaaaacagaaagtgctgtaaaattcatgcttgcgatccagaagcaaagggcaacgattagaaaaatttcgattgtattaatctttttcatatgtggtataattgattgaacagccggggctttcgccccgtcttggttacttgcgacgtttcttcttggagggagagcgtcgctttttgcttttcgtctcttttcgcatctttcgaagttctaacaagagtttaagaatcgttagccaagatgcggcgataacggaaagctttgttattagttcaatcaatcttccgtcctcctttctgtttttgaaggactgttgttccgtccttctaatactataatacacttttgtgtagtttaagtcaacacttttatgtattttttctacacttttttgtattatttctatgcatatatgttataataagttcataaacatagcaagcattttcggaggtattagaatgacgaagaaatcattaaccttaaaaccaaactataaaccactagagatgactttattaaagaaagacataacaaagaaacaactaaaggatgatctacgcatctccccgacaatcatggcgaagttctcagccggcgaatttgtttcgttaactacaatcgcttatatttgcgaatacttagactgtccgatcgaagaggtcgtccagttcgaacgccaagactgacccgccctccacacaacgcctttctacgctgatataattgacgtagggaggtgtttttaatggaaaatataaaatgtgcagcctgcggctttgaagaaggcgaggcaagttttgtcacaattgccccagataagaactacgtttttcttgtgaaaagtagaggattgaactcggcaactcaggatagagacacagctaaactagttatgtgcccggattgcaaaacggtccgcattcgataacttattggcgctgaacaatcagcgtcttttttatgcttccaagtcatcgaatcgatctgaaagcaaacggtcaagcatccggtccagtacgccattataatagccggccaagttgcggataggcttccgtttagtcgctataaacgtttgacgaacggcttccagtccgattccttgaagaatatcggcagcatacacgccttttaaatacgacgtatgcgcaaggtatatgccgtacagcttgctcgttaatttccgatcgctgacaaacgttttgaccgcagacttaaacgcagcatacgtattctgtaagaactttaatttgctttgagaaataacagcttcgttctcccgtttcggcgcttccggctttgcctccgttggcttttcgtcttcttggcggggtaacacagacggagtaacatcggccgccggctggatgacgtacatattggcgccgttgccgccggatatcggccggtatttaatttctttgcggataattccgagatcgactaaacgcttaacggcccgaatcacagtaacacggtgccggccgattagttccgcgatagaggcgagcttcaggtacgccacgcccggcgttttgacggcatgacgagacaacacctttagaacctcgattgcggcaggcgttagatcggatttattgcgatatatgtgcgtacggatggcgccgttaagctcgtccactgaacggaatgacgccattttagaggcttctttcgtgtacattcggctctctcctcgataagagacgccggtccgtcggaaatatgggcgcacttaaaaaagcgttgacaagtacgcttttttctgataagatagacgaagggtagggcgtcttatctatcggaatttatttccggtggatggcgttctttttttttgtttttaggcttttttctttctaattgtcgtcagcggtgaaaagtcgtcgtggcttcttctcattgctctcgtatccatttgtatataacgacgcattgttctaatgtccgaccatcctccgatcttctgtaacgtgaagggatcacagccgtttagtatcatcgttttagcccaagtatgccggtatacgtgtgcagtaaccttcttatcttttacaccggctttttccgcataatacttcagcctcttattaaaatgatttgcgcccaagggctcgccataactggatagaaaaatacgatcagtcgtaaagtgtgatttattttctgtgataagctgaagcaaaagctttacgcaatgagcagatataggcactaaccgatgctttctgtttttactaacatcggcgttaatcgttataaatcggcttgaaaaatctatatccttttcgcgtagactcaacaactcctcgatgcgaagcccggaatctagcaggcaattcatagcgcagtaatcacgaaagcccacataatcccgtaaattcggttgccgcaatatggctttaatttcatcatcagtaaaacagtttgtaagatcgatgtcctgccggagcagcttaacgcgtgtagccggatttacctcgatcaactcttcacggtcaagataattaaacagcgctttaattgttcgcaaattaatatttattgtcgtatctgaaagcccgactttattatcgtctgattttatatacttgtgcccgtgataccgcggcttgtcgtatttcatgtagttaatatagttcctcaaaatctccgtggtgatctcatcgatatatgtaacttcgtagttgtcgttaagccattcggtaaaataccgccacatctttttataatctgtgagcgttctttcgcgaagtccttccgttcttttaccggccaaagcgagctctaatgcttcgctaagtagtaaccgcgggtagtcttttttggccgccgaaacattcgtaactcttcgtcgtttcttatttaacgccataataaaaacgcctcccttaacgatgatttaagttacatcgctaagaaaagcgtcatcaacaatcctaacaaccgtaaaacagggttgtttttattccgaataataacgattaatcgcggatttttcactgcaatccgtaatcctccgattcagtttccgattagatgatcgattcatatctcggaaataggatcgagtagaaaaacgttgatataccagcgggcttacccttagcactcttccggcgtaccggcatttttggccgtgcggaaagaagaaccgcagccgcaggaagcgattgcattcggattgtcaatggtgaaaccgccgcccatcatggactgcttgaagtcaatgatggtgccgttcataatatcaaggctttcgctgtcgaccagaacgttgatgccgtgctgctcgaacaagctgtctttttcacctttttcatgctcaaaacccattccgtaagacaggccgctgcagccgccgccttttacgcctacacggagaaacgcgttttcttcttcgtgctctttcatcatatcttttatgtgcaaagccgctgcttcagtaattgttacgggaacactcatagtatggcctcctttttaaaacgaatgctgttatctattataaacatgaaagacctaattctcaaacgagctgtttacaaataatagacgccgctgcatacggtttcggcggggcctgtcatcagcacatgcccgttgtcctgccaattaatcacaaggtcgccgccggctaaatgaacggtgatctcccggtttcgttcggaaacaccgttcaatacggatgcgacagccgccgcacaggcgcctgttccgcaagcctgtgtaatgccggagccgcgttcccatacgcggaaatgcagttcatcggcgctgacggtttccacaaactcgacattgatgccttccgggaatctcgggtctttttcaatgacggggccgagcgttgtaagaggcgcttggctgatatcggcaaccggaaagacaatatggggatttcccattgatacggctgttcctgaaagctccgtctctccaaaaacaaaggtttcattgatcgtccgttcttcttcattgccgagcatcggcagctcttttttggtcaggcgcggttcacccatatcgacggcgacttcacgcacaattccgttgtccacagtaatgtctgcctttacaaggcctgagagcgtttcaatgaaaaaggacgtttcttctgtcagcttatgttcgtatgcgtactttgccacacagcgaaggccgttgccgcaattttttccttcagagccgtcattattaaaaatccgcattttgacaggcgctttttctgacgggcagatgaggatcattccgtcagagccgatgcccgtatgaacgctggacactttaacggcaatctcagccagccgttcttccggcagctgttcttcaaattggtttacatatatataactgtttccaagaccgtgcatcttggtaaaacggaatgaattcatatcggcctccaactttttttcttttacttagtataaaagctcttcccctcggacacaatacaaatatcccccgtttttcatacataaaagctccctgcatatgcagggagcttttatcgtttacgaaataaacatgccggcaatcgccgcgctgagaaggtttgcgagtgttcccgcaataaccgcccgtaacccgaggcgcgcgatgtccgaacggcggcttggggccaaaccgcccagtgtgccgagcataatcgcaatcgaagagaagttggcaaatccgcacagcgcaaagctgataatcgtagacgtttttttagaaaagtccgcaatatgaggaccgaagtttgaataagcgacaaactcattcagcacaagcttttgtccgatatagcttcccgctccgagtgcttcatgccaaggaacgccgataacaaatgcaatcggtgaaaacacgtaaccgagaatggattctaatgtaatatgtttgaaaccgaaccagccgccgattccgccgagaattccgttcaatacggcgatgagagcgacaaacgcaagcagcatggcgccgacatttaaagcaatctgaaggcccgtggacgcgccttttgccgcagcatcaatcacattagcggcgccttcgccttcttcgttcatattaaaatcaccttttatcgtctgcgttttttccgtttccggtattaatatttttccgaagacaagaccggcgggagccgccataaagctggccgccagcaagtattcgatcggaatgcctaacagggcataaccgaaaagcgtggaacccgctactgccgaaaggccgctcgtcataatcgtaaacagctcggagcgggtcaatcccgcaatcagcggtttaatggcaagcggtgattcagactgtccgacaaaaatattcgcagccgccgcaagcgattccgttctgcttgtcccaagaagctttgagagtccgccgccgatgacgcgaaaaataagctgcatgattttcaggtgatacaaaacggcaatcagcgctgagaaaaagataatgaccggcagaacgctcagcgcaaaagccgggctgctgcccacttttaacagcggtccaaaaataaagctgatgccttcgttcgcataatcaatgagaagctgcacacggcttgagaaccataaaaatacggcccggccggcatcccactttaatacgatgaatccgaaggccatttgtaaacataaaccgacaataacggttcgcaggttaattttgcttttcttttctgacaacaaaaaagcaatggctaatatagccgctgccccgagcagcccccaaacgatattcaatgaatacacctctaaaattttatttaaaaaaagtctttattaagataacaatatttatttttgctgtctacaaattttttattttgccaaaacccggggcgccataaaaaagagaccccgttcggagcctctgattaaaacatcggattttcttctatgaatgtatatatgttgtcaaccagttcagcaggcgtgtctcccgtgaccacttcgccgttaaccagggcgaacagggattccatgcatttcccgcaatagcttaaacagccgtattcaagcacgtccagattcgggtccttctccaatatctcccgtgcttgttgggaaccgcgcgctaaattgctgacacagaattcaatcatcggattcatgcggtttcacctcacatatgtaccttatcctaacggaatttcctctattcgtcaaagatcagatttcacgctcaatgttatcgtaacatattaattcagggtaaaggttttactattacgtgttttctggtcaatttgtaggttattttaaaactaatattgtggttttagatcaaattcgatataattctagatgttattttacatagttcgttaatttgtaacaacattgactaccatatttttcgggcaaaaggggaatcattatgaaaaaattggtcttgatcggcgggggttacgggaacatgcgggtgctgcaccgtttattgccgaaccagcttccgtcagatatatccatcacgctgattgacagaaacccgtatcactgcttaaaaacagaatattatgcgctcgctgccggcacgatttctgatcatcatatcagggtgtcctttcctgagcatccgagtctggatgttcaatacggtgaggtggcttctgttgacacgaaaaacaaacaggttctgtttcatgaccgcgaaccgatttcttacgatgacgcggtgatcggactgggctgcgaggataagtatcataacgtgcccggcgcgccggaacatacttacagcattcagaccattgatcagtcacgcgaagcctatcaaaagctgaacaacctcggcgccaatgcatctgtcgctattgtcggagcgggattaagcggcgtggagcttgccagtgaattaagagaaagccgtgacgatctgaagattattttatttgaccggggcgagctgattttatcaagctttccgaaaaggctcagcaagtacgttcagaagtggtttgaagaacacggtgtcaccattatcaataatgcgaatattacaaaagtggaagacggcatcgtttataatcatgacgaaggaatcccgactgatgccatcgtatggacggcgggaattcagccgaataaagccgtcagagaactggacgctgagaaagatccgcaaggccgcatcgttttaacaccgtatcacaaccttccgggagatgagcatgtttatgtcgtcggtgactgtgcaagccttcctcatgcgccgagcgcccagctggctgaagcgcaagctgaacaaattgtgcagatcctcctgaaacgatggaacaatgaagagctgccggaaacaatgccgcaatttaagctgaaaggcgttctcggctcactcggaaaaaaagcgggatttggccttgtcaacgaccgtccgctgatcgggcgtgtgccccgcctgttaaaatctggccttttatggatgtacaagcatcataacggctgataaaagaaaagccgctgattgcgatcagcggccaattttatgagcccgcaacatagccgcgcttttccatttcttcatatatatcttttaaatgcggattcccttcccctacaatgacatcttccaccagcacaagcggatagaaaaattcatcgtttctgattcgctccgcaagttcttctgtgtctttttgccggggcggtgtgtcaatatcaatgtaccgcatgttaaaaggctgctcaggatatttccgtttcagcgccgcctccagccattcaaacgtatctttggcgctcggcatatttacacagcttgcacagagcgtttcagcgccgtaaacactgagcgtaaccggctttgtcatgtttatcatcccctttacaccagtatacaaaggacggggcttcttttgtataaaaaacggtttttatgttcaagtttaaatatgctataatggagaaagcagctttgcaaaccaaacattagatttttaccgttactgtgaatataatggttttatgtatatgaaaggagcgaatctcatgactgaggttgaaatgaaagagcaagtacaggaagtattggataaattacgcccgtttctgcttcgtgacggcggtgactgtgagcttgttgacatagacgaaggcattgtaaagcttcgcctccttggcgcgtgcggcagctgcccaagttcaacgattacgctgaaagccggaatcgaacgcgcccttcttgaagaagtgccgggtgtcgttgaagtagaacaagtattttaattataaaaccaggctgaatacagcctggttttttatttttgcaaatagtcatcaaaccatgaacggatataacggatgcgtttcatccgctgttccggatggccgcttctcgacagctcgtgcgtggctttcggaaaccggatgaacgccgtcgttttgtttagtttcttcaatgcggtaaagagctgctcggcctgctctatcggacagcggtcatcgcgttcaccgtgcaggatcagaagcggtgtcgaaacgcgggacgcatatttgacaggtgaacgatcccaaagcttatccgcttcctcaaacagatcatgcccaagctgccagtcagtgaaaaagaagccgatatcactgacaccgtggaaactgaaccaattagagatggaacgctgtgtgacggctgctttaaaacggtcggtctgtcccacaatccaattggtcataaaccctccgtagcttccgcccgtcacaccgagacggccgctgtcaataaacggatacgcctgaatggcctcatccaccgcctgcatgacatcacggtaatctccgcccccgtaatcccctctgacacgattgacgaaatcctgcccatagccgtggcttcctctcgggttgacatacacgacggcatatccttgtgcggccagtacttggaattcgtgaaaatacgtatggccgtacatcatgtgaggcccgccgtgtatgtataaaatgagcggatatgtttgatcctcttcaaaagctgcgggcttcaaaaaccagccatgcaccgtcagtccgtcctgtgtttcatattgcatcttttccggcacggatatgatatgttcctccgcaaaccgatcattgttgtttgtcaattgcttctcttccccatcttcaagcgaaatgctgtaaagctcagaaggccgttcgggtttgacaattacggcgatacagcttttctgatccggatgaaaagcaaaaccgttcacgtactcttcttctaatcggatcggatatacgaggccgtcaatcgagatataataaatcccggtgcttccctgctcgctgccgaggacgtaaaatccctgtccgtcgtttgtccataccggccggggcgtcactcctcctataagtgaatccgcaataagcgcatcgctcaaatgaacatccagcatgtcggtcagacaggacagccgctcatttttcacgtcgtacagccacgcttttactaaagtagcattgcgaaattcattctcatggcccagcaacgcgatataagagccgtccggtgaaaacacgcaggaaccgaaagaaccgctgtgcggcgtaatctgtttgagatctccgtccgccagattcatcagatagacatccctcggctttccggcatcacccggctcgcataaattggcggtaaacgcaagctgctttccgtccggtgaaaaggctgcgtcaaaatgatccgcttcatgatccgtcagctgctgaatctcccccgtttcaagatgaatcagcacaagctgtgtccagcttccgttcagcaggcctttcccgtcacgtttatatgttaatgactgaatgtttaccggctcatattcgtcttgcttctttttttctttctcatcggcgcgctccgctgatgtcagactgacggacacaagcacggatctgccgtcgggagcccatatcggatctgccacgccccaaggaatatcagccgcccgttccgcctctcccccggcagcgtctatgatgtacagctgggggacaccatcctctctgtcagaaacaaaggcaaggcgccgtccgtcaggcgaccaccgcggacttgaatttttattatccccgaatgtccacgggtttgaggtaccggattctgtgtcatataccataatggctgatgaataagagtcccgtttatcattgacttttgtccggacgtacgcggcccgtctgccgtcaggggcatattggggatccgtcacggatacgagagacgcaatgtcctcctcggttatgagttttttcaattgtttctcctccttttctcttttatttcgcttccctaaataaaattccttctccagaaaaagaaagcgtccttctcttatgggaagaacgctttttaccattatacacttttgatctgctctaaatgattccgttcaattatgcttccttctgacgggacggtaagcgctgcaatctcgcagtgcggaaaatgttgagaaaggtgttttctcagctcttctccctttccttttgcagtcaggacaagaatcgtcgggcccgctccgctcagcgccgtcccgtaagcgcctttcatttcggccgcatgctccaccttcgaaagctcaggaacaagcatggcacggtacggctgatgcagcatgtcttttctcatcattttccccgcaagcgcccagtcatttgacatgattgcggcaacaaggaggttgctgacggcgctcgctttaacggcgcggcgatacggcagctctttcgggagcacgtctcttgcgtcccttgtcagaacttcgtaaaacggaatgactgcaacaacgtcgatatccgcctcggcaacacgcacgatatgtgtttcatcttcttcgtggaggccgatcacaagccctcctgcgagggaagcagcggcattatcagggtgcccctcttcaagactggctaagtgcagcttgtcggcttctgacagctgcaggccgcataattcatccgcaagctcaatagcggcgacgatagcggccgcgctgctgccgagtccccgcgcaagggggatgtcactccatactttgacatgtacgggaggcagctctttctgacagcggtcagccgtccgtttggcgacctggtagatgaggttgtccgttccttgagggatgcccgcgacagtttcggtttccgccgaaaacttccattcatcatgtcggaaaaccgatagcttcaaatatctgctgagcgccatcccgacggaatcaaaccccggtcctaagttggcggtgcttcccggaaccgtaatggaaaacagcatctccgcctcattcatacacgcgccgctccatttaagtattccagaatattgtcttcattcgtcggcagcgtgaccggttttaattcagatacgtctacagccgtgttcggatctttcaggccgttgccggtcaagactgcgacaaccttgcttccttttggaatttcaccggatttgacctgttttaaaacgccggcgatggatgcacaggagcccggctcggcaaatacgccttcttcacgggcaatcagctgataggcatgaagaatttcttcatctgtgacctcatcaatttttccggctgattcttttgctgcgagaacggctttgtcccagctggccgggtttccgatccggattgccgttgcaacggtttcaggatttttaatgacctcgccgcggacgatagctgcagaaccttccgcctcaaagccgcgcatcttcggaagtccggtgccgtttttctcatgatattctttgaaccctttccaataggccgtgatattccctgcgtttcctaccgggatcgccagaatgtccggcgctccgccgagctgttcgcatacttcaaaggccgctgttttttgcccttcaatccggtaagggtttactgaattcactaatgcaatcggagctttttcacaaatcgacctgacgatggccagcgcgtcgtcaaagtttccgtcaatcgcgatgatttccgctccgtacatgacggcctgcgcaagctttccgaaggcgattttcccgtccggaatgatgacgatgcatttcatgccggctctcgccgcgtatgccgcagccgccgcagaggtgttgcccgttgaggcgcacatgatcgtgtcattgccttcttctttcgctttggcgaccgccatgaccatgccgcgatctttaaaggagcccgtcggattaacgccctctgtcttcacatgcaattcaactccgagcttttcagaaagcttcggaaggtgaatgagcggcgtgttgccttcatgcaatgtcagagccggcgtctgatccgttaccggcagaaattctttatattgatgaatgagtcctttccacattagctccaaccgttcccttctacgcgatatgtgcttttgacttcttgtacgacttcaagatcatttaagttttgcagaatgtcgctgaaatcctcttctgacgtgtgatgcgtgacaatcacgatttccgcgagatcgtcatggcctttgatcggcagctgcagaattttttcaaagcttacgccgcgctctgagaaggcggatgtgatttttgaaaaggagccgacttggtctttgacgtgaatccgtaaaaactgctgggcgtagatatctgacggctgcttcagatttctttcaaactgcggcgcgacaaagctgtttccgtttacgccgagacgcatgttcttcataaccgcgacaagatcggaaacgactgaagtcgcagtcggcatgcttcctgctccgggcccgtaaaacatcgtttcgccgacggcttctccgtacacgtaaacggcattgtactcgttatgcaccgcagcgagcggatgatgatccggaagcagtgtcggctgaacgctgacctcgattttattgtcatcacgctgggcgatgccgatcagcttcattgtgtagccgagccgtttgctgaaactgatgtcttcatccgtaatgcgggaaatcccttttactttgacatcatccagatcgacattcatagagaaaccgagacgggctaaaattgccatcttgcgcgcggcgtccagtccttctacatcggcggtcgggtccgcttccgcgaatccgagatcctgcgcttccttcagcacttcttcatacgggcttttttctttaatcattttcgttaagatgaagttcgtcgttccgttgacgatccccatcatttttgtaatccggtcagaggaaagcccttcttcgagcgtgcgtaaaattgggattccgccggcgacactcgcttcataatacaagtcacagccattttcctttgcggcggctaaaagctccgagccgtacacagcgatcagatctttattcgcggtcaccacatgctttttcgcactcaaggcgtcgagcaggtattgcttcgtctgttcgacgccgccgatgacctcaataatcacatcgacttcaggatcatcgatcacatcatagacttctgtcgtcagcacttctttcggcaggtctgcttctcgttttttatcaatatctttaactagcactttttttatcgtcaccggacagccgacctggtgcataagcttatcctgatgatcttgtataattttgacgacaccgcttcccacggttcccagtcctaacagtccaatacgaatcgcttccaaagaaactccacctttctcccttttgtccactagaaaaggacaattgttaacccttcacagacatttaagttacaaatattatataagcctgtttttgttttgacaagcggctgaatattggttatacggtcatgaaaacgcttaacacattgatatgacaagattctctattttccaaatatttttacgtcatatcttcttacgaatttcttccttttccgagccaagccacaggcgggacaaaaatctgcgccgatctgacattcatcatgtcgtgacaggtctgtaaaaactgttcataacgggtgcagtcagcaagaatgtagtcaagctgctcttcgtaaaagtgcttttcagaatcatgagagatataatagctctccaccgtctcgaaaaaatggagcggaaacagcagccggctgtaaaacaggcgttttgaaaaggaggataacggcgtaatttgctcatattcctgcaaaaacaaaaacccgtcattaagcaagtcgtcacggtgatacaaatatgtgctgcgcatatattccgcaatatcacgggctgcatggtcgaatacccaatcccccggaatgcggatcaatgattcagcagaccaggtatcccgctccatccgctgatggcagatcgtccccgagtcttccgcgccgggattgtcatccagctccgtatccactaaatattgaatggcgttttccgctaagcctgaataataaggaaatgcttcgatcattttcttttcgaacggttcaagcggagacatatgaattttctgcatccagaatgattccagctgatccacccgtttcccccataagtccttccattggccgatcctgcccgcttctttcacttcatacggaaagccccgcccttttctgtggaattcggcaagctccccgccgacagaaaacggccggtttgagactggaatcggcgcttttaagagcgcatacgttttgccttcgtcctcaaaggtcagctctccttccttcgtaaagataaacacggaaacgtatgggtcactttgttcttgtaaatactgactcatgtaataaagctcggtcagctccgattgcgtaaagccggagacgggaataataagaaagaaggaattgggcgtctgaaagcattggtatttctgataaacggaaagctgtctgacgtggatgccgtatttttctttaatgatgcttttcatcataatcacctgcctgaaaaattagagctattcacatcgtagtcatacgccggcggaattatgaatacatattgtattcctttgaacgaagaggagaaatatcgtacacatcggaagggtgctgtataaactagtaaaaaagattgggtgaaacaaatgtcagaaaaggaacaactgaatcaggtggaagctgtcgccagagcgcgtttaaaagaacggggggttgagacggacgatattgccgatcttgtgtatttcctccagaaaaaatatcatcctgatttgacgatggaggaatgcaggctcaatgtagaccgtgtcatcgcaaaacgcgaggtgcaaaacgcgattttaacgggtatagaattagatgtgctcgccgaacaaaagaagctgtctgaaccgcttcagaccattctggcgattgatgaaagcctgtatggggtcgacgaggtgctcgccttctctatcgtgaacatatacggctcgatcggctttacgaattacggttacattgataaagaaaaacccggcattctcgggcgtttaaatgataaatcaacgggcgaatgccatacatttctcgatgatatcgtcggcgcaatcgcagcagcggcttcaagccggcttgctcacagcgccagaaatacagaataaggacggccgtaatggccgtcctttttttatagatgttcaatccattcggttaaggaatcaatcgcatatgtcggcttctggtcataaccggccatatgttcacgctttgtcacacccgtgtgaaccagcagcgtgtccatccccgcgttgatgccggccataatatccgttgcatagttatcgccgaccatgagtgtttcggaaatatccgttccgagcacacgcatcgcctgttccataataatggattcaggcttgccgataaagacaggctcaacgcccgttgacaccgtcaaaacggacgtcagtgaaccgttccccggcaacagccctctttcggtcggaatggcgacgtcgccgtttgttgaaataaaccgggcgccgtttctgatcgcaaggcatcccgttgccaatttttcatatgtaatgccgcggtcgattcccacaacgacaaagtccgcgttttcttctccgaagctcagcccgttttcttcaatggcctggcggatgccttcttcgccgattacatataccgatgcatcttttttctgctgggcgatatgctgcgcagtcgccatgctcgtcgtgaagacctgttcttcagatgccggaatgtcaaagctcatcagcttgtccgccacctgcttcggcgtccgggaagaattgttcgtcacaaataaatacggaatgccgcgcgctttaagcgttctcacgaattcacacgcttcttcgattttttccgtcccgttgtacattgtgccgtccaaatcaatcaaatatcctttataatccttcatactcaacactcctgtggattttctcacttgttgttatttaaatgcggaaacaggacctaattctgtttcaaggtaggttcttactcggaccggaaaggctttcagcacgtccttgtttgacgtgatcaacgcaaacagttcctgatgatcggcgtgctgatattcctggacaagctgctttctggaagaaatcaattgcttcagcttatttccttcttcttcagctaccaccttttcatccgtcagaatatccatgatgtcatcatagctgcccggatcgcgcatgataaagccgtcaatcatatcatttccgacatcgagaatgcattcgatcataagatggctgatccgctcaagcgcccgtttttcgatctcgctctgccatgccggcgtgctatcaaacagcgccagctggttctcaaaaaaacggagtgtttgttcgattttatttctgtcaacaaaatacacgtgacagcatccccttctgcatcaattattttctgattcgttttaaaacaaaatacgcgcagccgaaattgcagtattcataaatatattcgtccaatgtgctgattttcgtttcaaaggttgctttttgattctggtcatcaaagaagcctttgagccgcagctgactgtatccccagtctcccacaatgtaatcatatttatttaatatgtctgaatagcgggctttgaacgcttcttcattaaagccgtttttaaaatcatgtacgagttcaaactcggcattttgaataagaatcatgtcttcacctcttttatcactctttactatcataattcattgacttctgtccatcaattgcaaaatgagacgctttggattgcccggagaattttccccttttatatccagtgtagcggttcagacgatccttattcaagaatgacttttccccagaaaaaacggctccatcacaaaaaacccaaaacctgcggcggtttgggttttttcggcttttattatgcttgggcctggcgttttttagacgcttcgtttacctgttcatccgcatggtaggaagaacggacaagcgggcctgcttcacagtggctgaagcctttttgcatcgcgatttctttcagttcggcaaattcgtccggatgataatatttttggacttttaaatgttttttcgacggctgcaggtattggccgatcgccatgatgtcgacattgttcgcaagcaggtcgtccatgacttcaataatttcttccttcgtttcgccgaggccgatcataatgcttgatttggtcgggatgtccggctgcatttcttttgcacggcgcaaaaattccaaagaacggtcatatgttgcgcgggcgcggactctcggtgtcaggcggcgcacggtttcaatattgtggttcagaatatcagggcgggtatccattaatgttttcaggttgtcgtaatttccgcccatgtcggatggcagcacttcaatcgtcgtgaacgggctttttctgcggatcgcccggaccgtttccgcaaagacgcctgctccgccgtctttctggtcatcgcgcgccacggccgtaatgacggcgtgttttaaattcatcagcgcgacggaatcagctacgcgttccggctcctgcagatccagctcagtcggcagacccgtttttacagcgcagaatcggcatgctctcgtacagacagaacctagaatcatgaatgtcgccgtacgtcttacagcccagcattcatggatgttcgggcattttgcttcttcacatacggtatgcagattattttcacgcattaattttttcaggcccgtatagttttcattcgtgttcagctttattttgagccattccggctttctcagatgctcgtctttctttgccatttccccatcatctccattatccctgtattcatgttcgtgtgcgaaaaatttctatttcacgatggatataaaacttgcggatttctattcattagtcactttaacataggaaaaatttctcgacaagggaagagaattacttacattttctcggaattgtgccgcaaactatttgtattcaatcctgaaaggagatcatgttgtgaaagttctgttatctgctcttctccttttatcagttttctgtccggctgcaagcgggaaagaacaatcggcttctgtttacagcgaacggatgcagttgtaccgcaaagccgaagcggtcacgcagattccttggtatgtgcttgcagcggttgatcaatatgaagaaaatatccgctcaaaccgaaaggacctgcctgaaaaagcgggaatcatcagcatttatattccggattatttgtggagcggacctgaaaatccaaatcctaaggacgatgcgcccctcagcattaaagtatttgacgggatcggtctggacggtgacggtgacggaaaagccgaagtaagcaatgatgaggatatcctttatacatttgcacagtatttggcggcattcggaacggatcttgaccatatccgcatcggcctctggaattattatcgccgtgatcagacggtcggcattatcacggaattcatgacactgttcaaaacgttcggccgccttgatctcggagaacacgcttttccgcttcccgtaaaaacggattacagctaccgcagcacttggggcgccgcacggggtttcggcggacgccggattcacgaaggaacggatctgttcgctcattatgggctccccgtcagatcgacctgctacggtattgttgaaatgaagggctggaaccgcttcggcggctggagaatcggcatcagggatatcaataacacgtatcactacttcgcccatctgaacggctttgcaaaaggtgtccataaaggccagatcgtcaaacccggagaggtgatcggttctgtcggaagctccggatacggaccgccgggcaccgcgggaaaatttccgccgcatcttcactacgggatgtataaagataacggaaggtcggaatggtcttttgacccgtatcctcatttaagggcatgggagcgaaaagaaatccgcaagaaaaagtaaacacacagccgccagaagagaatgcggctgtgtgtctttatttgtttttctcctttttttcattcggcagctgaacggaaggcgtcacgcctgatccgccgcttccgttataaaactgtggcacctctccttgaatggctttaatggagaccggaatattattcgtaacgaccgacgttttgctggcaaacggaataatgaccttcactttaatttccacaaaaatactgatatcaatcagggcattgttgatgccatacggttttatttttgttttcacatcagttaacgcatcgccgatcaggttaaagcgcaccgggattttcggccccagatttccgagaatgctgtttcccgtgacctgccctaagggaatatcaatcataatttcatcggccgttttagcgcctttttctgtttcatgctgcttattgttcgactccgcttccttcaggtgagcctgaagctgctttgtcactttcgccttcatgctgttgaccatttgtgtattaaaatccatcgttgtgacttttccgttttcatccgttttcatatcgaccatatctttcacattatctgtgtgagacatatattcttcaatggattccgtaatgacttcagtcgccacccgtttcgtttccatttccccgatgttcatcagcaccggtttaattgaggaattgatcatccaaaggctgatgaccgtcgatatgataaaaaaagcaaacgacagaagaagcacatatcgaaaaggcaaaggccctctcttgcgaagagcgctccggtatctaggcaagaaaaatccccccttacatatcacaatgtatgcttgtaaggggggacatagtattttattttcactcttaaaaagtcccgctttcactgggggcagctatattgcattatgactgctgcgcaagcttccaggcgagcagatcccttaaaaactccggcataaagtattgcttttctttcgaatcgcggatgtacgggaacagctttccgagtgtaaacatgtcgagaacggcaaccgagtatatccggtccgaatcaagctcttctccgttcactttcacattgatgagatgcgttacaccgtcttcaaggatatcagtctgcacctcggctccggcatacaccatcttgcccatgacctccccgcggaagccgaggccttttatccgcagctgctccatgttttctgaggcagcctggccgattgtttcctggagttccctgcctgaaagacgcacggcgaccggattgatcggatgagggcagatgcggtgcagatcaagctttgtgacaggtcccttctttagaggccccaaaatgacgcctgaattcaccatgctgacttcacagccgcaccagtttttcagcgcctcggctaaaagaagcgggagcggtgattcctcaaaccacttcacgccggcttcttcattcagattggcgacctgtacggagagcagattttccgcttcccgttctttctctttcagaaaagccgccgtatctttagattccccgtgccaatcagccattttctgcacagatgcctgtttgctgacgatggttcgtgtttcactgtccagcgtcagctcgacacagccgacatagtttccgtatttttccgcacatgcaagcaatacgccgtttatgtcctgcccgtcctcaagaaggtggtgcgtatgtgattcaagaatgacatcgatgtccggaaatgtttccgctgcggcccggtcatctatgaggcctagatgcgaaagcagaatgatgatatccgctttgcccttgatatcgtcgagtgattcttgaatgcttttttccgcatccgtcaccgtccagccgagcttttgatagacgggataatacggcaccgtgacgccgagtatgccggcggtcatcccgtttttcagcgttttgatcacgtacggcacagcccatttcggccgctgtccgtcctcgtcaaacaggttggatacaatgacgggaaacgcggcatgatgatataaatccgccagctcatcgtgaggcagcgtaattccttcattattcccgacggcagccgcatcaatctcaagacggtttaacaagtcgacattcgctttgccgaaggtcgcttctgtaatcatttgaaatcggtccatatgatcgccgatgtcgaatacgagtgtttcctccccgtctttttcatgctcatttttcttctgctcaatgtaatgtacgattttcggccaattttcgaaatggctgtgcaaatcattcgtatgatataaacggagtttctctaacataccatctctcctaccttttagctgaatatcccttgataaatcaattcacagccgatcaaaatcaatacgacccgcatgaaaagcacgatcgttttcgtccggacccgcttattgacccacgcgcccattttgccgccgaaccaagcgcccggaacaaggcacagcgcatacaaccaattgacatggccctctgcgatatgtgacacggaacccgtcacggaggataagaaaataatgagcattgacgtcgccacagccactttcggcgggaacaaaaataacagcatcatggccggaaccataagagagccgccgccaatgccgaagagaccgcccaataagccgacgaaaaaggcaatcgcgataccggtaaaaatacggtacgaatatgtataaagctcacccgattcatcctcatatgtccggattatgcctttatgggctttattgaccggttttgctttcgccttcagcattaatgtaatggaaatcaaaatcataaaaagtccgaaccagacggaaaacgtatgcgcattaaaaagtttagacaaatacgcgccgatgatgcttcccgggccggaaccgataaaaaagatcagcccgcttttgtaatcaacggttttatatttcatataggccagagttgatgacaggcccgtgaaaataatgaccaaaagggacgtgccgatggcagtctgcggcgttacgtcatggaaaaacgaagtcatcgtgcttaaatagagcatcgccggcacgatgataattcctcccccaagcccgatcaggctgccgaccgttcccgcaataaatcctaatatgatcaaaataagataagacatgtgtcttgaaacctcttttctagctgaataggtcgagctgcttcggagcaagcccggtatatgagatatctagcatttcaagcatctcaaggccgttatcggcggcgtctccgcctgagttattgttgaacagcacatacagattgcgcgactgttttttcagctcctgaagattgtttttccaatctttgagctcctgtttgttatagcggtataaatatctgacctcgcgccagttttgaccgccgtcaggtttgatccagccctgcttgttccgcccgtgaaaacggataagcgttttttcttcatccgttgctttcaggacggtcggaatgctgccctcgccaatttgcggctcgtcacatatgctgtgaatccagccttccgccttcataaaggaaagcgtctgctcgtaaaatggcggggaaaaccacgaccggttgcggaattcaagggcgcacgggatatcgcccatctgctgcctgcaccatctcaaatatgcgacgttttctttcttgcagtcaaaccacggcgggaattggaacagcaccatggcaagctttccatgttcaatatacggcgtcaatgacagcttaaacgcttcaaacatctcttccttcgtttcaaaaggaatatcgccgcgctgatggcccgtcattccttgatatgccttaacgacaaattgaaaggattccggcgtctctttgacccatctttcgttattgcgggcgggctgtatcgcgtaaaagctcgcgtcaagctcaacgatgggaaaatgggaggaataagcctgcagtttttgcgggcccgctgttttaggcggatagatgctgtcatgatccccccatcccgtcagtccgatataaatcacattccttcacctctcactctagtttatcacaggtgtttttctctttccgtttccatgttttttctgaatgctcttgtcagatacccgtattgattttcattggtgtccgaaaatgcctcacttctggaagaagggatatgctgatagacgatcggctctgaaaactgaccgctcgtgaagtcatatatctccccatctatccggttataaaaatgccagcttgttccggttttcgttttgagaatgtcaccgccgcacacatcttggatgactaaagccgtcacgccgcactggcctttggccgggcattcttccgtccattttgtactagtcttgcgcgaccaggatgccgttaatatgttcaagatttgatcatacaatgtgttttactcctttttataaaaagataccacgagacccgctttccaaacgacaaaaaaagccgattccccgtcagagaatcggctctttcatttcagtaggcttcagaaatgttccgaaagccccgctctccttatcaccgtcatcctgatacacacagcgtcccttgctgtaggtcgcagcaatgcggtatggaaaggtatggccttcatacaggctttgcttatgtctggaaaacatcgtttcttttgtgacggtaaaggattccggccgtacgatgacaaaatcagcgtcaaatcccgcttcaagccggcctttattcattaagccgaagcgctttgccggtgcttcggccgtccatcgggcaacatgttcaaacgggagccgatgctcgatcgctaattgaatcatgccaagaagcgtaaattggcctccgctgatgccgccccatgacagaaacatattatcctcgcgttttaaagacgggtgacagggagaatgatccgaagacaccatatcaatcaggccttctgccaacaccccgatcaattcctctttatcagcctctgaccggagcggcggcgcgcatttggcggcagacccttttttaaggaagtcctcaaaactgaataataagtagtgcggacacgtttccacggtgacatccattccgtcttttttcgcctgctgaatggacatcacggcccgtttcgtgctgatatgtacaaaatgaagcgcgcatcccgtcaccttcgcatattcaatcgcccgctgcacagcctcgcattcagcttcttccggacgggatgaagtgtaagcgcgggcatcaattttcccttggagcgcgtactcggcgccaaggaaacgggtgagggcgtcgctttctgcgtgcagggccaaaatcttgccgcacgccgcgatttctttcattccttttaaaagtgtccgttcatcagctgactgaaattcatccgttcctgattttgataagaatgctttaaacccgatcgcccccgcttccgccatcggccggatatgttcggtatatccgggcatcaaaccgccccaaagcgcaaaatcaaccgctgacttccggctggcgatttccgcctttgccagcaggttttcagcagtcaccgttgaggggatgcaattaagcggcatatcaaaataagccgtacagccgccggcagccagcatctttgagccggtttcaatgccttcccattcttctcggccgggttcattaaaatgcacgtggcaatcgaccgcgcccggaaacacatacatgccgtccgcttgcaccacttgttccgctttttcgtctatgccgggcccgatcattgcgattttcccgtccttaacggcgatatcagcctgcttcgtcccgccttttcgcacagccttcgcaccctttacaattacgtcataggccatttcatattcctcccttgtaaggatgacgatttttctgtcagtttttatcacaaaatgcgtctataattgccagtttactgctactataatcgtaatacatcagcaaagccgctataatttttgatgatttttattcatattaaccaatggttgtctttagaaccggaaggagattgaccgatgaatatttatgacgtgatgaagattcccgcttatgagcgggccgcattaatcgcaggcaaatccggcggatggagggaggtggagcacgtcaacatgatggatgcacctgatatcgctgattttttacataaaaatgaactgctcgtcaccacggcttatcacttgaaggaccgcccgcagctgttgaaagacttgatccgcctcatggcaaaacggggctgcgcgggactcgggatcaaaacgaagcgttatcttgatgtcattccgaaagatgccgcggagcttgccgatcggtatgaatttccgattattgagctgccggaagacatcaggctcggagatattgtcaacaccacgctgagccatattcttgatatacgttcaaatgagctgcagcaggccatttacgcccataaaaaatttacaaatcacatcatgagcggcaaagggctgcaatctttgctcaaaaagctctcagatattctccggcttcccgtggtgcttttgaatcagcatacaaaactcttatcatcgtcccaccgcatatccattgacacacctttattgaaaaacatcctttattccctttccgggccttatttcacctgcttttccatgctgtccgaccgaaaggcgtattctgtcctgccgattttgaatgatgaaaaaaactgcggttatctcatgataccggagctggtgcagaccgctgataaaggcatgattttgaccatcgaacaggcggccaacgtcattgcctttgaacttctgaaagaaaatgccgtcaaacaattcggcagacgggcgcgcaatgaatttttcagcaatttcatcgaccgttcgtttaccggccatgaagaaatcaaaagccgcgccaaagaattccggctccgctgggatcaaaaatatatgtgcatctgcgggaagcttgaccgggatgaaaaaacaatcagctttaccgaaaatcagctcgcttctgatcatgtgtttgaactgcttgaaggtgagctgtcatcctttccgtttccccctcatctcttcattaaaggaaatgtgggtattcttttaattgaagcgacagacagctggaatgaaatgcacgcgtctgtcatcagctttttggagcagtttcaaaagcaggtccggacacagtttaaacggactgtttccttcggcgtctcaaacatctgccaaaaactgatcgacgtccctgacgcgtttaccgaggcttctgacgccctttcatccgggcatttgtccagaagcgcggagtttattcaaatctatcatgccaaagacgtcccggagctgctccgcctgcttccgacggaggatttgaagaagttttaccaagtaaccctccaaagcctggccgatcggcagcaggaggaccagagcctgcttcatacgctgtctgtatatcttgagacacactgtcagatctcagaaacggctaaacgcctgtacgtccatcgaaatacggtgatctatcggttagaaaaatgcgaggaactgctcggcaaaagcttaaaagacccggagacgacgatgcgcctgcggcttgcgctgagaatgcagcggctgattggttaaggaatcgtttctttttttaacgtgaaattcactctcattagtattttcgccaaattacaccccgtcttccgtcgactatcgtgtgactaaacatcatattcggaagaagaaaagattgaaaagtgagaagaacagaatcattggccgtatttacacttagcctccagtgtatatctatcatgtacgaaggagtgattacagtgcttttactcggcatggcgcgcaatgagttttgaggcccggtgagctttcttgccctttagcgattgatttgcagacatgggctcttaccactttgctgtaaaccatgcggggcaattcatcgactacggcttctccgttatgctcggcagcccgtttgctgccgacacacactgatgatggcaatcaagttggcttcatccctaatgattaaacacccatgccgaattacagtaactggccgctaccctttacaaatcggcggaatatatgaaaacaaagaggatacgtacggagagccgctcgaacgctacgttgccgcagagctggttcatgacataggcacttccgtatttacgaacgaatgcgaacctgctttaaataatcggacgcagaaatttaattgggatttcctcagcagtttcaagtcatctttccaatcaaaattatacatggaaccgtcgtcgactagatacctggctcagatgaaagaaaggcttgcatggattctgtgaggcagcagatgcggataagccagggtgtggcgttcttgcaggtagccgtcactaacgaagacggacgattttacagatccccttcttcccggcgaacaaatgctactctgagaatatatggtggaatgctctatggatgcctgtttctcccctttgggcttgcttgaaactacccatttccttgatccatcttattcagattcattttcacacaccgattcagcgaaggataatcacattcctcctctcctgctctccccattctgctatcaagtgtatagagggagttaggggttcatactcggacaaagaaaaggatgcaggtattccctgcatcctaagtactatagaaaattctcagtccctaaaacattaattaatttagaagaattttagaagaatgactactaattcgaaaccattattagatattagcgtgtccatttacttgaatatacagtttgaattaggtctgtgtgatcccagttattatatagtttcactttcacacgggttgaagcggattttttggcgatatttgtaaaagtaacatttaattttttgccgtatgctgcgttacccgaagcagtatcaatagtcttccatgaaccgcttgtataccgctgaaggtataatttacaataagccgcagtttcccatgtacctgatcttcctaattcaactgttgcataaacatttttgtagttatctgatgtatgtatatatgattttgcaataacagatccagtattgtaattaaagctcgttgtcttacttactgcttgcgccgattgacttgatcctataaaaatcaggccaaaagccataacacctgctaacaatgctgccaggatattcttagttttactcttcatgttaaatccctccgttaataattatgcttgtaaattacaagactattatacattataacccatatatcctaatttgtaaaactacactagaatacgttgagttttaaagtaatgttataaatttcacaaatatattattataattgcccgagaaacatctaattttctggtataaagacaaaacatgagataaatttctgattattaaccatcgatatttttcttttctggtaattttctatataaagtaaaagcgcaagcactaagcggctattcgttaactcaaaataacgataatggtacgggtttgtcttggaataaatatgtgtattattgtgagttttattaattttctcaaaagaagaccttccgcagtctccaattcaaataatagtccgacttttaagaacggagtttcaacttgtaaagcaaacctagatcggcgcccctctgtacatcttcaaggttgccagatagacatttggttcgaatgaaaatgtttaagcaactgaaacgtttcctctagtattttcgcttacatatatttgtgatgagccaggctgttgttatcagatgctcattacacagcgagctataataaaatcgtccttgcttatatcgaaccgattccattatagaaacgtcatcatttcagaaaaatgagggagctgctaaagcaggagacagcattcatggtgactctttggtaagagactgacggatacatatgaaaaaatcagaaatgttcggagactagcccgctgtgcgcgtgctacatcgagaacatttccttcagcagtattctttatttctaccgcagttcctgaaagtttatccgccgtaataaaaaaattgttcggtgaagagtaataacaggctctccggccttggtattcatgtggtagtgtcgacttttttgtccagttgaccggattatgaatggagattgagccacacatagcctcctttattaagtgataaaacctgacagccggcttcgtatatcccttcccttcagaaaatactacaagagagagacagttttataaatgaaattttcatatgaagaaaaaacgaaaagcctccggaacccggaggctttagctggttatccttgctgcgtgaacggccgggtctgtgtctttttgccccagccaagcgcggccagaaaactgatgacgagaatgaccgcccccagcatatacggaaattccatattcacatcaaagagaaaaccggctgctgacggtccggcgatattcgctaaactgatgaatgaggtgttcatccctccggcaaacccctgctggtcacccgcaagctttgacagcatcgtattgaccgccggccggagcagcgatgtcagcgtgagaaaaaagattgccgcggcaaacacggtccaatatgagcctgcaagcctgcaccatacaagtcctgccgccgcaccgatcagcgtgacgttaatgacgcgcttttccccgaacttaccgacgagataactgacaccgaccgcctgcacaaagacgccgatgagacccgcagccgtaataataaaggcaatatcagacgctttaaatccgtgtttatggtcaacgtaaaggccgaagacggattcaaagttcataatcccgaagttcagcacaaaaaccagaatcagcataaacgcgaacggtgatttgagcgcgcgtgacatttgcttaaacagatgctcacgtttttccatttttgcccgggcttccagctgcttttcgcgtcccagcgtctcaggcagaaagaaaaatgaaagcacggttgaaaagcaggcgagacctgcagagacgatgaacggcacagccatgccgtaatgaaccaaatagcctccgacaccgggcccgatgacgacaccgagcgtcatcgccgcgctgaacagccccattcctttcccgcgttctttttccgtcgtaatatccgcaatgtaagcgaacattgacggcattaaaaacgccgcccccattccgcccaaaaggcgggatgcgaacaattgccacaggcttccggcaaaggcgaagatcaattgtgacaccgcaaaggcggcgatgccgaaaataatcagtttccgccgtccgtatttgtcggttatttccccggcaataggcgcaaatagaagctgtgtaagccccgccgcagcaacaagcagtcccatcgtgcttcccgtcgctccgaattcggtaatatatgcgggcataatcgggataatcagcccgatcccaagcatcgcaataaacatattcagcattaaaattgacaatcggcccatatacgccatgatttcttaccttctccccagacaaacagataaccattccatatttgtcattttttatatcattcagtataactggggaaagggaaaaaagtccagatgatttaaatgctcggttttatgtctcatgacagcacaccggttgcagcctgatgatcatatatgttgagagccgcctgcagcgcttcgccggctttaacggcaaccccgtgcctgatcagaaccgcttcaagaccggccagcacaaacagcacattttcctttctgcagctgtagcccattgttccgattctccatattttcccctgcagcggaccgaacgagctggcaatttcaattccgaattgagacaaaagcatactcctgatcgattcgccgtcagcttcttgcggaatctgcacacatgtgacgacaggcagcttcgcctccggatcgccgaataaatcaaggcccatcgctgaaagtccggccataagcgctttttcatgacgacgatgcctgcggaaccgttcttcaagtccttcttcaaggaccaaacgcaccccctcccgcagtgcatagagcatcgttgtcgcttctgtatggtgattcagccttctctcactccaataatcttcgagctggctcagatcaaaatagttgctcgtaatcggacgataatcagacagcatttgaccgtcagccgccgtcgcgatgccccgctctacctttttacgtccggcaatcaccgcggccgtccggtcattatatgtaatcggcgccattcctgaaggtaccgataagcatttttgcgttcctccgataaccgcgtcaatgttccattcatccgtttttacggcgcagcctccgatggtggccacggcatctacgataaagagcgcgtcttgttcgcggcacgcttccccgatttctttcagcgggtgaatccgtcccgttgatgtttctccgtgcaccatggccacaattttcggggagacctttttcatttcgctgataatctcttcaggctgaaagaccgttccccattcacactcgatcgtatggacgtccgccccgtaccgctcggcgatttcagtcagcaaatacccgaagcgtccgtatatcggaacaagcacgcggtcgcccggttctatcacacttgcgagaaccgcctcaattccggctcttgatgtgccgtcaatcggataggcccagcggtttttcgtttgaaacaattcacggagcatttgcatcgtttcgttcatcatgtctgtaaatgccgggtcaaactggccgatgatcggagcgcccatcgccctcagcactctcggttcagcttctgtcggtcccggtgtcataattgttctttgcggaatgctcaattcttttctggtcggcacgccgattccccctttgcgttaataggcaagtttatataatacattcgccagcgtacggacgccggtttccagctgatgcgcaggtgtgaattcaagcggagagtggctgattccgccccggctcggcacaaacagcatgcaggccggaaaggttctgccgagcatctgggcgtcatgccccgctccgcttacgatctgctccgagtccgccccctgttcttttgcagcctctgcagccgttcgtatcagcgtatcatccatttgaaccggctctattttcatatattcatcaataatgtgccggacccctttgctgcggctgattttttcaatgatcgaaaccagtttctgatggaaggctgtcagcacatcttcctgctgatggcggatatcaacggaaaattggatacggcccggaatgacattcgccatattcggttccaccgtcattttcccgcacgtcaggcgaagctcttccggctgtctttctgctgagagcatgagctcgtggatgatgctgcttgccgctgcgagcgggtctttccgccatttcatcgaagtggttccggcatggttgcattcaccgtcaagcgtaacggtatagcgcctctgcccggcaattccggtgacaatcccgatatcctttcccgatcgttcaagcgtttgtccctgttcaatatgaacttccagaaaagctttgatgtcggtccgtagcggtgcgggatagcggcctgcaccgaagccgttctgccgcatggcttcttttagagaaatgcctgaagcgtctctcggcgtttccgcatctgaaagcgagaaagccccggtaatatttcccgatccccaataggtgatgggaaaacggcttccttcctcttcacaaagcgacacagcctccagtgtttttttcggacgcccgaacgtctcatacaaatgacggatcgccagcatgcccgccagcacgccgaatgctccgtcatatttgcccccgtcaataacggtgtcaatatgcgacccggtcagaatcacctcatccggcgattctgaaccgctcagcctgccgaacacgtttccgacatcgtcaaatgccgtttcaagcccgaacgcctccattttctttttgacggcaagctgggcatccatccattctttcgtatataaaagcctcgtcactccgccggcagcggaagccccgaattgagacagccattgaatatcatcggaaattccgatactcgccgccgacagctgctgatgtttcataggcaccctccttttaacctgaccaactggcaagatgaccttcattatagaaggagcgccttatgagttcattatcatatcttctaaaaaatcgatcatttttcagacacttcgtccaacaagccgcatcttccgctctaagccgaaggaaccatttttcaaaaaagatagaatattagatttattttttggataatagaggtaaaggagggcaagtcatgacaaaaaaactttggtttctgccgattgtctgcctgtatttcatttttggatgggccgcgccgtcagcctctgcgggcgcgccggctgacacgaatctgtacagccggctgacggtttcaactgccggcaccttttttccgcaaaccgcctcatcggtcatcactccgtctgcggacacggacacgtattacaaagaagcttccggaaaaagcgggacatccttaaaaagcgctctgcaccgcatcatcagcgggaatacaaagctgtcttacagccaagtatgggatgcgttgaaggaaactgatgaagatccggcaaatccgaaaaatgtcatcttgctctatactcaggaatcacgggcaaaaagtaaaaacggcggaagcgtcggggactggaaccgtgaacatgtgtgggctaagtcacacggaaacttcggcacatctgccggccccggcactgacattcatcatctgcgcccggcagacgttcaggtgaacagcgccagaggtaacatggattttgataacggcggctcagaatacccgaaagcgccgggcaactattacgacggtgattcgtgggagccgcgcgatgaggttaaaggagacgtcgcgcgcatgctgttttacatggcggtgcgttatgaaggagacgacgggtaccctgaccttgagctgaatgataaaacgggaaacgggtcggctccctacatgggaaaactgtccgttttgctcaaatggaataaacaggaccccgtcgacagtaaggaaaaacggcggaacgaactcatttacgaagactatcagcataaccgcaatccgtttatcgaccacccggaatgggcggatgcaatctggaaatagtgtcacagaaatgataagggagcccgatcatcaggctcccttttttaatatacggcgtcttcggtctcggtatcaaaaaagacggccctgtccatattgaccgcaagcagaatggcgtcgcccggtctcacttgtgaagcgccgtcaagacggatcgtcaggcgttcgtctccgcttgatgcatgaacatacatctccgcgcctaagttttcacacacttccgccacagcgcggcacaccgcctcatccggattgtctgactgtccggcaagcgtcaaatgctccgggcgcagccccgctgccatctctttgccgctgtatcctttttgtacgagaaccgccgctttttctttcggaatgggcaaacgaacggacgaaccggcaaaataccattgtccgtcattttcctcaatgatgccttttaaaaaattcatactcggagagccgataaaacccgccacaaacatattcgccggataatgatatatctcatgggggcttgcggcctgctgaatatccccttcattcatcacgacaatccggtcgcccattgtcatcgcttctgtctgatcatgcgtgacataaacgatggtcgctttcagacgctgatgaagcttgctgatttcggcgcgcattgctacacgtaatttcgcatctaagttggaaagcggctcgtccatcaaaaacaccttcggctcccgcacaatcgaccggccgagcgcgacccgctgccgctgcccgcctgagagagccttcggtttccgcttgagcagatgcccgatttccaaaatatcagcggccgccctgacacgctctgcgatttcttttttcggcagctttctgagcttcaaaccgaacgccatattatcaaacaccgtcatgtgcggatacagcgcgtaattctgaaaaaccatcgcgatgtcgcgatccttcggaggaagatcattcaccgcgtctccatcgatataaagcttcccatcagaaatgctctcaagcccggcaatcattcgtagtgtcgtagatttgccgcagcctgacggaccgacaagcaccagcagttcctcatccttcacatccaaatgaaaatccttcactgccgccgattgggcgccgtatgtttttttgacatggtcaaatgttaatgatgccattagaaacctcctccaatactggaaaccgcctcatctttctgttatgttaaaaatgttcggggtttctgacagattcataaaaaagcaaatttgtattataacgtcataatacatataatagtactactactcgacataaggaggtccgtcccattgttaaataacgggagctcaaaacctttatatattcagctgaaacaaattatcgcggacgatatcaaaaagggcgtgtattcgccgtccgtgaaactgccgactgaaaatgagctttgcgaaacgtacaatgtcagccgcataacggtcagaaaggccatcctcgatcttgtggaagaaggctggctcgtccggcagcagggaaagggaacgttcgttaaaagccctaaactgaagcgggagctcatcgcggtcaacggctactctgaatttatggaatcaacaggaaaaaaaccgaaacaccaggtcctttcccatgaaatcattgaagcgcctaaatccatcgcccaaaagcttcgcatcgcttctgaaagtcccgttcttgaattaaaacgcattttatttcacgacgaccagccgctctcattcgaaatcgcccactatccgcttggtttatttcccgacatcggcaagcatattaaagacggcgtgtcgatgcatgacatcttgaagcagcactatcaggtggtgcccacccataatacgaagctgttaaatgtcgtatacgccaaacaggaagaaagccgctatctggcttgcgatatcggggatgcgctttttgaaattgataaaaccgcgtttatgtcaaaagaccagccgatatacagctcgctgtttttaatgcataccgaccgcgtcacgtttaccattaacagtccctacacgtaacaggcataaaaaacgagacaatgcttatcgtattctcgttttttcattgcttttcccgccgcccggcctgtagggatgcccgtaaccgaacgcaccgaatcctccgcatgttttggcagccgtcccggcagccgcagcaagcgctcgccgtatatcctgatgctcgaaaaaatcggtaagaaacccggcgataaaagaatctcccgcacccaatgtatctattatatcagctctaacaaccggctgatgatagacgcgctccccatctgataacaccgcgccatattctccccttgtcagacagacgattctcgctccgtatccgcgggctttttcggcaagctgcacacattcgctttcactcaaatcgctcccggaaaaaaacgcatacgtcacgtacggacagaccgcctctaaataggcttcgtcacgttttgttgagaaatcaaaggaaatcggcacatgaccgctcagcatcggaaggtcacgctctatcctgctgtatacgctcgtgtgcagcagatcatgtccggcgataaatgagatgtcattctcctgaaaagcgagcgtcagacgcgattgcacgccgcctttatttgatccggcaaatatcctgtctcccctttcatcaagagtgacgaccgccatgccgttttctccgtatgcccggcggatcaaatcagcattcaccttttccagtttcagcacgttcaatacgtgatccgccgcttcatcactgccgagtatcccgatataagaagtgtcgtggcctaagcgccgcgcaagcacggctacattcagcgcattcccgcccgggtaaaacgtctcctgatcctggtaataatccaccacattatctcctgccgctatcagtttcatcttttcatcccccttatcctttcacgcttcccgctgcaataccgcggataaaatatctctgcatcaataaaaacagcactatgatcggcgcagccgaaatcgtcagcccggccagcagtacgccccaatccgtctgcagcgcatctctgaactgcatcagtccggccggaatcgtccgtaaattttcatcatcgataaaaataatcgcaaacataaactcattccacgtatggtaagccgtcaaaatgcctgatgtcaccagaatcggcacactcataggtaagaatattctgaaaaatattcccagacttgtacacccatccagataggcagcttcctcaagctctttggaaatcgacaaaaaataagaacggatcagaataacggtaaacggaatacgataggctgcgtacggaaggatcaaagcccaatacgtattgtacagccccaatgactggataatggagtacagcggcacaagactgacctgcggcgtcagcatcaatccgccaagacaaatgataagcacaaacccttttcctttaaaatgaaaacgggccagcccgtatgccgccaaggcgctcacaaatacagttatgagacaagtcagcacggtcacaatgacgctgttcataaaataagcggaaatcccctggttccatgcggagacgaagttttcaggatgccaaacagacggcagcgaccagctgtgctcaaaaatctcatccgagcttttaaaggcgctgaccgccatccataacagcggataagcgacggcaatgaagtagataaagagaaacagccatacagacgtttccccgatataccattttctccgctttccggctgttctgacagtctgccgcggatgactcaagtccgtcctctcaggaagcatcggctactcctcctttccggtcttaaagaatttcatctgaataagcgacagggcaagcgtcagcaaaagcaccaccgtcgcaatcgcggaagcgtagcccatcatatcttttgtaaaagcgctcttatacaaaaatgtgctcagcacttccgaagcgttgcccggtccgccgccggtcagaatatacggttcattaaatacggtaaacgcgccggtcagcgtcatcaccacggcaacaaacgacatttctttcgtctgcggcaccgtaatgtgaaaaaactgctggatttttccggctccgtccaactgcgccgattcatataattcagcgggaatgctctgaatcgacacaatgtacagcatggcgatgtaaccgacggactgccattgagacacaaaaatgacagacagcattgcggtgttttcatcgcccagccacgcacgggtcagttcatccagtcccacggcttccagcagctgattcaaaagcccgatttccgggttataaataaaatcaaacaaaagcgcaatgacggtcatggaaatgacgaccggaagaaaaaataccgtacggaaaaacggcgaccattttcttaccagcctgtcttccagcacggccgccagaatcaacccgccgcctacctggcaaatcagcgatatgaccgcatacagcacattgttgcggagtgctgtaaaaaacacgggatcgtgaaacaaatcaatataattttttaaaccgataaatgtcttttcgggttgaaatgagctccactcaaacagactgaaaaacacattctcaaaaatcggaatataaacgaacagcaagaaaatcagcgcgggcgcgagaaacagatacggaatgaaacgttttcggctgaccaaggaaatcctcatctcctttctcccaagaaatctgttctattcagatgacgctttgacttgccgggccgctttctgtacggatttcatcacctcgcgcggtgtcattgtgccgccgagcatctgctgaacgcccgcagcatacacatcggcgatttcaacgtcaacgtccatgtcaaaccacggcaccatggattcggcgcggacaatatcctggacggcttcgcgctggatcggggaggtattgttttctgtcgccgttccctgaaccgcactgtatttaccgacatcttttatcagcttctctcccatttttttcgaggttaaaaactgaagaaattccatggcttcttttgggtgcttcgtttttgaggaaatcataaatccttccggagatccggtcagcgcacggggagatcccttttcgccgctgatttcagggaaaggaaacaagcccagattgaccggttcgacgagcttaatttccgccgtttccgcataaatcatcgccgctttgccgctcgtaaactgctgacgcacatattcgtgatccacggaattcacatgctttgtaaagtacgggagaagctcctgaagcttttccagcgctttgatatagccttcatccgtaaacgccccggttttcgggttgtaatccttggcccgcgttttttcatcgaccatacgctggttcagcgtgccgatataatgagaaatggtccaaggcgcttttgtgccgaaactgatcggaatatatccgttctctttcaatttctcagagactgtgatcagctcatcccatgtcgccgggggcttcaaatgtaatttgttaaaaatgtctttattataaaagaatgatttagcgtccatttgccacggaacaccgtactcttttccgtcatgcgtaaagggtttgacttgtgactgtacaagctgtgaggaccaatctttatctttctgatagtaagacgacagatcgagtgctttatctcctttgatgaatttgtaagcaaaccggtcgctccatgaaaagaaaatatcaggagggctcgttgttccgagcatgactttcaccttgtctttataagaatcgtttaataccgcttccgtttggatgtgaatgtccggatgggcggcttcaaattctttgactgcttcttcaaaatagcttttttccggctctttcggccacctgtgaaaaaacttcaggttcacttttccggcagaggaactgctttggcttgaacaggcggctgctgacagacatacggctaacagaacgaacaggcagatgagctttttcagatgcttttcctcctttgtcaccggactataacgttatatatcattatagtccggtgaaatataatctgcgttcttaatattcgactttccacatgtagcgccgctggcttaatggatggttccttgcttctgccagctcatccgcatagcttctgagcacccgatttaatacgagcggagccagatatccttttacagaatcgtcaattccggaaaaatcatatgtttcggcatcaaggacagtcagttttttgccgtatcttttggagaaggaaagcgcccgctcttcaaggggtcttgtttcgtctaagccgagaaggataataaatggaacggattcatcaatgatttcgaacggtccgtgaaaatattctccggcatgaatggcgtgggaatgaatccattgcatttccatgagaatgcagatgctgtaggagtaagcgacgccgtagtttgcaccgcttgccttcgtgtaaatgatatcttctttttcgtgggctttcgcgaatgcctttgcgtgatccgcttcttgtttaagcgctttgtcataaacggcctggagcttattgagtccgtcgatcgcctgttcaaacgcgagatggttttccagcacgtgtaaagcgccgaatacgatttgatacagaactccgtaattcgtatttatcgcctgtgcgttttcaccccagtcataaaccgcgacatattcggcttctttcgctaacggcgagtcaggctcaaaagtcatcgcaatcgtaagcgcgcctttttttctggcgaaaccggcggctttcaccgtttccggcgtattgcctgaatgagagcataggatcacgagagtgttttctccgagctgaacgggattgcgctggataaactcattcgaactgtagagatcagagctgatggctttcgcctctctgtcaaacacatacttgctcggatacataatggctgaagaccctccgcatgcaacgaaaaagacatgatcaatcgtttttcctttcagatcatccaagaaagcctgaaccttgtgattcacttgtgcggcagtttgactcaaatccttcactcctcagtgttttattatataatgttatataacattatataacgttatattaatcgcaataaaggcgtgttgtcaatcatattttctgaaatttctaaaatataaaatagacttatcttatttcccgcgctctcttgacctgacccttagagacacgtttagaatgaaaagcagggagtgatgcagaaatgaatatcaaagaagccgcccggcagacgggtctcacgaaaaaagccatcaaatattatgagcaggaaggtttaatcactgtcagtaaaaaccctgataacggataccgtgagtattccgctcaggacgtgaatacgctgaaaatgattgccgccctccgaatgctggcactgtccgtaagtgatattaaagcgttcctcttagagggcaccagcctgcatgatatactgcggcagcagcatgaaaaactcagccggcagattgaagagcttgagcaggaacggaaattgaccgaaatgctgctcaaacgggtggaggatgcagaaaacgtcgattcgattttacatgatatcggcgaggtcaaaatagatgaaccaaagtatatggggcttcagctgaagaaactgttcccgggagatttcggagaatttattgccgcgctgtttgaacctttcctcgacttttctattgatacagatgagaaaaaagcggcatgggcggagcttattaaagtattggatgatatggatgaagttccggctgcacacccgatgatgcagcttgtcggcaaggaggacccggctcagctccagcagcacaaagcccagcatgatcaattcatcgagcggattttggagagagacccagccacttgggacactcataaaaacacaatcattcagcttgtgaaaagagtgcagacggatgaagaatacagagaaagcctgatcaagatcggggaatccgcttctgatctgcccgcgctgaaagcgggctcgcctttcagcaatcttcttcaaaagctcagtccgaaatatgacacatatgtgcggcttcatctagaactgaaaaaggaagccgacgaggaactcggctttgattcagaggcatacttaaatcagatgctgcaaattaaaaaacgctaaggcccgtttccttagcgttttctttcttcagcttcagtgctgcgcattaatgcggtcaacgacatttgcgatgagctgctcttttcctaagtcggaatcttcgtcaacgcttgctaccgtcaaaatgatggccgctacggcaagagcgatcgtctctatggcagccgccgcgtttaaaaatacccatacagccgttgcgcattgtccgatggccgttgattttcctttgtccatgctttttttgtcaaactcttctttcagcactttcgccataatctgtgagccttgatcgatgacgctgttcactttctcataatcgccgctgtagaccgccgcttttaacttcttaaaataatccggcgatgactttttaatatcagcgatcacctgatcggaaacttgctttaattcatcctgattaatctttttgacggctttcgtatcccatacttcaggaagaagctttgcgacctcaccttgtccgaaaaagatgccggaaaaaatgtcttcacccgaataagagacggatgcctcagttttcgctgtggcatgcgggccgactaatgcgatcattaaaacaaacaccagcatcatggcggcagcggattttttgcttttaaccatataatttcctccttttccttttattgagaaaattgtatctgataaaaagcggattgtaatggttcaaagctactgttttctctgccggtaccaaaaacaggactaaaataccagctaccgtaatggagaacgaggtaagccccagcataacagcaaagatttcatgcatgaaaatggatataaacaatatcagacgccaatattttttcggagcgaacaaagcgcagaacataatggtttgcacaatgagcgtgccccaagtcgggatgatgacaagctttgactgcaggataaagtcaaacagactgtgaagcgcatccggcagccccagcatcggatcgttcaaatagtaataaacggcggttccgttctgccattcttcttccatcagcttggcaatgacggagttaaagtacagcatcgcgacctgtattctgatgatcgtcagcgtcgcccagcataacgaacggtagtaaggctcaagcggcctcttctcaaaagacgcctcgtacggagaccagtgccatttccgcggatcagtcaatgtcagcggaagcagcagcagcgtaaaaacagcagccacctgatctcctccgtcaagagtaacggcggagttttggaagctgtacgaaatccaccaatgaaaaaaaccggtgaggcggggccgccagccaatgacaaccagaattaaaatacagatacaaacggctttgacgatctcaatgtaacggaaatcgggaaacagcaaaaacaaactgaacgtgtcggaaaagctgagcatttgattttgcgttttgaagaagacagacgccggattgaaaagcaatgtcagcagcgtgccgagcgcgattaagcttctggcaagcccgtacacatttgtccaaggcggattctgcatcatccataaagtgagctgcttttttgcatcctgaatcaattgacatccactccgatgtattttttaacggttcgtttcgtttcggtatgtttgctccatgcccatggggtaatgcgttcatatgtaatgatcattttccctttcagccttggggagggcgactcatttttcattttcaaaaatgtggtattcttaaagtcctggccagccgtgaaatcgtgccacttctctttggaaggcagcttttccagcataaggccgagctctatcccttgcgtccgcccgtatcggtttaagccgatcacatttttcagtgaattattcggccatctgagcttttcatcgccatcaaggagatagatgttcagactgtcttctctcggatctttactgaaaaatccccagctttgcggataaatcatggaaacggttttggattgatgcttggttaattggatggcggagcttggcagtgccgcgatgacggttaaaaacaaaacgatgatccaggcggccattataaaaagaaagaatgaaaacatgctgttttgtctcttgtcagtcaattgaaaccctcctatcgaatggacatttcattgacatgattatacaccattcaacaggtaaaatattgagaaattagattttttggactaatatactattatatgtaaaaaggagtgttcatatgtttttgatgaatgataaagtgctgtggggagcggtggcactcgcctttattctgtcgattgtgttttatccgtttcttcctgctgatatggctattcactatgacgcgtcgaaccgaccgaatacagccatcaataaaacggccggcgtcctgatttttcccgtgcttatgattgtctgcatgttattcagaaaacgggtcgtccagttattcctcgtcgtttactgcctgctgatcgtgcacatcgcagtgatgtggctggcaatgtaagcataaataaaaccggagcttaaagggctccggttttgcttatttataaaatactttctcaatgttgtatttcgactgaagggtattgatcgcgtacgtttcgtaaatatctctttccatcggatcatttacgacacatacctcaattttatacacttcgtccctgtgatgtttaacaggcgacacattgtcttcaaaatgctttttgattctttgtcttaatttacgggctttcccgacaaacagcagctcgtcatgaatgttataaaacataaatatgccgcctttgtctctcggaatttggtgaaaatcaatgaaaccgtaaatcgctttaatcgccggttcattttccgacggtgactgctgccgttctgtaatggttacatcaggagcaggaagttttatttttatcaaaataggtcacgtcctcttattcattaaagctccatcctaccataagaatacccgaaaagccattctttcattcgagcgcgccggccggatcatagaggctcaaatcaatttcggtctgccggccgagtgcgagtttcgccagttcagctccgagatacggtccgctcgtcagacccgaggcgccgagcccgttggccacgaggaggccgctgatattcggcaggctgccgataacgggaagaaaaccgggagtaaacggcctgaaaccgactcttgtctccatcacggtactgtctgaaagccccggcgcgacggttaatgctttgtcaaaaatctcgccgagaccgcctgccgtcacccgcaaatccatgccggtatcgttttcatgagtcgcgcccgctacgattctgccgctgtcaaatgcgaggatgtactggtcgttcggcggcataaccacaggccatccgcccgtatcctctccctgaagctctaaatgaacgatctgcgccttttggtacgatactgaaaagcggatgcccagcggctgaagcagctccttcgcccaagctcccgccgttacgagaacctggtcggcatgaagcgtgcgttcttccgttttcacaccggtgacggcaccgtcctctgtcagtattgacgcctcttcatgataaactgccgcaccgtgctttatggccgcgtttaacagtgccttacgaagcgccctcccgttcacccgggccgcaccgctgatatgaaccgctccgtattcctccgacagcgcgggaaacaatgccttcgtttctgccggagtcagtcttgtgatgccgccgatctcaggagcgtcctctcttcttttataagctctttcttccatctggctgagctttttttcatccgtatggagactgacggcaccgaccttttgataaccggtgtccgtttctccgtcggcttccagctgctggatcaattgttcataataacgggcaccgccttttgcgattgcataccatgcctgattgcggcgctgcgacagccacgggcaaacgatccccgccgctgcgtcagtcgcctgacccgggtgtttccggtcaatgaccgttacttccgcgccggcctttgcaagatgataagccgctgacgcaccgagaatgccggccccgataatgatataagacttcatgtgtaacaccttttctatctgttttgtcttatttattttaacaaatggagcgcccggttcctaccggagtcctgacggcaatgatgagtttcgaaaacggaaacgtatgataaaaggaataagtcctcgtctgaaagccgttttcctcaagaaactttctgtattgagacatattttttatatctgacacggccaatgtgccgccgggcctcagcaccctcaccatttccgcgatcgcccgttcccgctcttttctccctgaaatgttgtgtacgacaaaatgtgaaatgacaaggtcaaacgtttcatcaggaaatggcatgtcttgcgccagtccgtcatacagatcaattcccggcgctccttcagccagtctgttttgttcaaacgcctctcgtccgtttccgcccagatcccagccagaccacttgtcaatcgctgagacatccgcgcctttctgcgccgcggcgatggctaacagcccccgccccgtcccgacatcaagcaccttcatgttcggctttaagccggaaagcgcaagaatgcgatggcggtgtgaaagtttaatagtcattgaatacagcagcatccaaagaccgagtaataaaaacaaggcgcccgtcagccagccccagaaaggagaataattccccataaagtacctgcgccataaaggaacgcaacaaagataaatccaaacgccccgtaaggcgcatcaatgccgtatcgtgttgtcatatcgtccagccctttcaatatttatccaaatagtataccatatgattctggcagcagcagaaaggagaaacgacaatatgaaacgaggccttacgtttgacatcccgaacacattcggacagtttgcggcagacatattaaaaccattccccatttccgcctatacgtggtttatcggcgatggggaggcatataccgacttcaaagaagacaccgatacagacctgtttccgcaaaatcagcgcatcattgagggccatgagctccgtcagcgtcttgaaggaaactcttattatatgatttttgctgaattgaaggctttcccaagcgggatggtaacggaaatcaatacgtacgaagaatatttaaagagtccctgtgagcttgtgcttctcatcgcagattgctcatatgtatccttatactgcaaagatccggacatgctggaagctctttatcagcaggctgtacaatgcggatttctccatgttgactatgtcacagatgagaatgatgcgagaacgcgtttatctgtctggtgaaagtgcgttctttttatgaatcgctaaatagggcttaggattcaaaatattgacaaattcgtgtgttttcaacaataagacatccccctcatgtatactgatggcgtaataagacatgtgaaaggggtatgacaatgagaagcggtttgaagaaaaaatcaggtttttggaagaagacggcggtttcgtcacttattttcaccatgttttttaccctgatgatgagcggaacggttttggcggccgggctgaataaggatcagaagcgccgggcggaacagctgaccagcatctttgaaaacggaaagacggaaattcaatacggatatgttgaagagttggatgacggaagaggttacacttgcgggcgggccggctttacaacggctaccggggatgcgctggaagtagtcgaagtatacacgaaagcagtcccgaataacaaattgaaaaagtatttgcctgaattgcgccgtcttgcgaagaacgaaagcgatgacacaagcaatctgaaaggattcgcttctgcctggcgttcgcttggcaatgataaggctttccgagctgcccaagatgaggtaaatgaccgcttgtattatcagccggcgatgaaacgttcagatcaagccggattgaaaacggcactggcaaaagcagtgatgtacgatacggtaattcagcatggcgacggcgacgatccagactccttttatgccctgattaaacgcacgaacaaaaaaatgggcgggtcaccgaaagacgggacagacgagaaaaaatggctgaataaatttttggatgtgcgctatgacgatctgatgaatccgtcagatgaggatacccaggatgaatggagagaatcagttgcccgtgtcgacgttttccgtgatatcgtcaaagcgaagaactataatttagacgggccgattcatgtccggtcaagcgaatacggaaatttcactattcaataaacaaaaaaaccccgccatgtggcggggttttactattaaccgattgagccttccatttcgaatttgattattttttaacatcttagcatatcactgcttgtcttgattactggtttcatggtatttcctgcttttccttctctcttcaaatcataatttatcataactttgtgggtgttgtgtgggtggcgcccactattcttttctaaaattctaatgtatgctgaaataaatctatagtaagggacgatggggatgaatctaaataaaataagatcggcgctgtacaagtccgcgagaattttgggggatgtcaacgcagccaaaaatgggtcacttggaaaaaggatggcccgcagagctgcaggaaaggcaaccaataaattactgagaaatattttcaaataagaacaaaaaaaggccctgctcttagtgagtagggcttagtcattatgagggcggtatttcttgtttgctgccagttctcctttaagtgcctcagcgtcctggcgcaaaaataagctggtgtttcctatcttcttaaccggctcaatacgcccatctttaatcaatttactcatgcgctgcttgttcacgtccaaaatttcagcaacttcggtggtgctgaggacttcagcttttacgaagtcctcaacctcctggcgaccccttagatgaaattccatgttattttctccttatatctttgagaattgcataaacggtcaatgctactacaatagccattatggccgttgtaaatgagtttgtccaaaaggagcgcacgcctatcgctgccgcactcaaaagaattaatgaaaagatgaacttttggtttttcttcattttttatgctagactgattataatgttattgagaagcgagctcccactcgcttccctgcatcaggtttaatccttcttattatctttcttgttactatcgtgggactgctgaaaaatccaaccgatagaaacaacatagaagataatttgaaggatttttattatgttgtctagcatttcttcacctccttatgtatttattatagcatatgtatagactaatgtctacacatttaacaaaaaatttccctcctgggtaaaaagagagggatttttctctatttctcttttatattagagcttcaagttttgctttcgtatccgatcggatagttgttgcccagcctaagcccgctgaacagaatagaaaattacactcatctgttttaaaatgtaaatgttaccttaaaaaattggaggatattatgattttatttatgggatttctctctatattttccgcaatcggaatcgtaattggtttaattcttttattcttcaaaagaacaagaaaaaaaggcctatggatattgccaataagcttattactctcaatctgtggatttacttatatggctcaatcagatgattcgccaactgagaaaaagtccattacctcaagcacctctcagcaagatgaactggacgatatttcaactgaggaaaagcagcaacagattagaaaagacgctgatttcaaaaaaatcaatgttgaggaccctccagataaaatagttcgtatcaaaggagaagtttctgcaatcaaaaatgccgaagctggagggaaatttattatttcatctaaagagaaaaacgggtatggtgtttataatgtttttgcgctattccctacaaagttaaaggagaaccaaaccattattctttatggatcagttcagaaggaaaaagctgaaaatggaggaccactaataactgggcttttttatgataaagccaaataaattcctacattactaacttcaggagttgatcgcgtatgactgattttgaacgaaagtgtatcggattatttttaatatgagccgcttcgggaaaaatccctccatggaacaattgaaaaggaaaaccgggaaagatgagcagacgatccgtgctgccgtgaaaagtttgatgagggaacgtatgttgaaatgggataagcataaaaaggtgtggattttttagaataaaaaaagctctcaattaaatgagagtttttttacagcgcatgttggtgatattgagtaataagttcatcagttattacacaattttgacctggtttgtatactctatgccacggcccaccatcttgatgagttttttcaactaaaccaaatgcactatatcgtccgtacttaacaagaacttctataatacatccaagagcttcaattccatactcagaagataaaatcttcataaaagaaggtgttattactacatcgtctgtacgaagctttatagaagcatcttcttcataatctatttcacttttgccatgagttttgtatttatagaaaatgctctcaataactggcccatatttaaacgctactataggttctttgaatagcttttcccctgttttcaacaaaaactccgcatagatataataaagtagtttttgtaattttaagtgagacgctggtttaaaagacaggacaaatttcgccacatcatatgcggttagttctttgtcttttgagatcacatctataaaggttgaaatatcttctgtaacataaacatcatcgaaaaaggaatctttctcggttacagatttccaactagttgaatcggttgatagtttgtgaattccgaattgaaccatgccacatttttctttaactctttcaaagaagtcggaaatgtagtttttatccaatctttcttcacttgaatagtgccagcccattcttctaccaccagaaaaatcactaatgatcgcgataaaatgaaatgccatgtttatcacctctacttctccacttctgtggaattcttataaatcgacgcccaacctttataagcttgtttatgaagttgatgcgaacgattattcgcttctttatcgtctgttctccagatttgaagctcccatgggaagaaaaaagtactctcaccataaaaataaaaatgaaatgctttgtagtcgcctttggaagaatccatacaatttattttgtattgttttttcaacaactcacacatgtcctgaaagcatttattattatggtcaaaagagtcaattgttattcgaatacccaacaaatcattcaggcactttcttaaagctatttgcccgctttctttttttcccacacgataatatttaagcttattgacaatggaatctggttgttttactctaagccgcaaatcaaattcactgtacagatattccaagtcattataaatgacaatatcttctagtttatctgcgtaatgttggagcaaaataaaaaaatcattgtcgattgagaaaatgttccttttttctgtaacttctgttacgtgtcttatttgagttttttttaaatgaacatgctttacatcttgttttaagctgaagttggttgaaaaatcactatgcaactgatttatttcaagtatcaactgatgaagatggttgcaaaatgactcaatccgacaagtacatttgatcaattttttcttcctcggttattttagtttgattttactcttttatcgtcatttatacaatgatttgcgagggtttatttgaagtttttcttgatttttttaatcaaaaactttataatactacattttgttcttcgaaaacaaaatgacataccatatgtagtgtttttttcttcatgcccaactttttagcactctaaacacaatatgtagatgaaatgaccgtaatcacctattttatctacatattgtgtcaagagttattaattgttctacgtcaagattaactcataaaaagcccccttagaaaaaggaggcagcttaggattacttcaatagtgattcaagttttgctttcgtctttgacccgtaaatgccatcagcagacaggccatacatagactggaatcgcttgaccgcatttgctgttttcgaaccatatgcgccgtctattccgaaattctttgcattcttatccgggtagtaatgaagagccgccagcgctgtttgaatctgttttacggcctcccctcgggtcaatgggcttgtgactttaaaagtacccgcaggcaggctgaattttgatttctgagtgtttttaggctttgaggctgttacctcttcttgccgccgcttttcagttcgttatcgcttttgatataggagacattcacatacccgtggaatgtctggccttttgaattggtgtattcaacatatccccatccgttgacagttgatccaagctgatatttcacaaccgtaccgttcggcaggttaagcaccatggaagaagaggcgctccgttgcgtacgtaaaacaaggccgtcacttgaaaccaccgtgtttttgataaaacggcctttattcgaatcggtgttggttttcgatttgttgttagttggtttgttaattactaccccacctaatcgcgcttttactccattcttgaaatcagtaaacccttgggatctgcttacccatggggccggacagattttgtgtgtaatgtcatagtgccgcacgatgtcattgatcggatcaagtttaaacttcttgcatagctcagcgcagacttgttctgcacgggcaatggtatccggatggaaagttccgtccttttcaatgcaaagctccacgcctatagacaagaaattcgcattcggtttcagcgctgcgacaccccggtaaggctgcccgttgacgaattgctgaacgtcattcgcatgataggccacctcattcaacggaatgatgcaaatagcctctatacgatcgacaaaaatatgtgctgatgcaaacgtctgttttttctcagatagatttctattctgtgcaggaagcgtttgaccaaagtatctataatgattggcagcagacgcgccgggatttgccgtgtaatgaacggccagtttcttcacgccgttgtttttgattcccggccgcgtccatttgttaatatcaatatattggtttctgaatgatgacataaaaatctctcctattctgttttgaaatataaaagaggctgccgaacggcaacccctcatttaatgagtttgtggtgtttcagaatggctttctgtttattgcctttctcagtcacgtagttatttttaaaccacgctgtcaacgttgtaccaattgtaaaagccgccgatccgacggtatacaatccattcacaagttgagtcacctggctgtctgtaatctctagcggagactttccaaacatcagcattgtttggttaattaatgcaataaaaagaagcacagtccgaatgaccgtacccctgtctctcatattcaacatgaagaatcctcctatttttcaattttcatttgaatttcgtccagcttatcaatgacaatttcatatttatcactgaatcttgctaaaagctcattttgagaatcaatttgcccgtataacttcgcctcccgctctctgctcgttttcatgacataatacagcagggagcaaaataacaccgcaaacggcccctgagtcatcaaatactgcatgatatccatttccattgttgacgtctcctttttgacaaaataaaaacacctttaggttacaggtgccgtttcattgttctttacttgttcactctcagtagtgctgccagttgactcagaagacccggccgagggtgtggcatcgcctgccgtttccgttgactcttctccgtaatcctttccggtaatctccttaaattgatcgggagtaatggcgccgccttccacacaaaatgaaatatcaaaaccccattgataataaacctgtgcatctgcatatgttggaaaattcatgtgttactattcccctttctgtaatgtcatgactgctttagtcaattgaataatttgatcttgcatttgcttgatagtttgactatccgtaatgtgctgctgcacaagggccacaatttgctcttgggcctgctccattgggccgggcgtattcaaatcattaatgacgggattttgataatccgggttaacaatcagtgcaccatcagataatttgtaacggaacggattggaaataaattcagccgtggcaaattcatccgatatctcaattgctttatccagttcccccaccaatgcataagctgctacttcgttgttttcatttaggacaatttgcaattaaaagacccccttgatactcgaaatatagatttcggggttactgatttccattttttcagtatccagcgaaagacattctgtaacaactaatgtctttccgtccgtgtacttcagtctgatttcatcttgatacatgcctttcccgttgctttttaggccggcattgttgatataaaaaacagtatcgaccgggacggggcgctgcgtcgaaacatagtaatagtccgttttaaaatggacttcaaaaaggaaatagctgaaattagaaatatcggcagccagtttaatagtatcccccgctttcgcgctccctgaaaacaatagaactggtgattttgacacccaattacgataggctccctgatatttttcaatatgccaatcagatccctgcaaagtcactaaaccattatcctgatcactgaaaactgcaaaaataaatccatttgcattatcgctattcaattttggaggtaggtttttagtgttggtatcgtaccaatatacacctgtactaatgatgtcttgaacatttgccaagactacgggctttttatccatcttgtcggcaactgctgtatcaactttttgtttcatttcggctaaatctgaatcaacagtcttttggatattgtccactgtactgttaaattgactgatttgatcattgagagtcttcatatcattgttgtattgcccagttgtaacaatatcactattttgaattttggtattcagggtgtttagctgctcttgcaatgattggattgttgttttagtgccctctatgatattttgtgttgcgtcctggtctgatttaatttgttctaaaaagtcttcataggcttgtttgagctgcgccttcaaattttcaaaatcagaaataaaagagactgaattgatacccatttccactttgttctcaagcactttgattttaaactctaatgtggtgtctgtctgactgtctcggctcactttaaagaatgcctgttcatattcccccatcgctgcaaatgcttggtaagggaacacataacgaaaaatcccgccctgggcattaaggacaataccgccgtttgtatcaataatatgcgtgccgtcaggcttcagcccttcgaaagagacagttttcccggttagatcataaggcgtaccgtttgatatgactgataccgtcaccgcttttaaaccgccgtcccccactcttccaatgataagctgctggttaatttgctctaaatgtgccttgctaatatcaaaaactaaatcttgatttgccatgttttaaacgctcccttatccgtagtagtaaaaataattccggcaaatttcttggaaaataatttgatgcccgatctcattcgggtgcaacccttctgacatacacatctttctgaatgcaggattgtaaggatcaaataaatccgtataaaacatgtcagcatacgggacagaaagcagcgtacacacttccttttgtgcatccacatagtcggccaatatcaggcccaatttgtttttatccgtatcccggcggactatttttccgtttgtaatcttcgcttgtcgtgtggcagtcatcacgatgatcttacagcctttatttctcatacggagctgttgaatgacttgataaaaaccgccgtagaattttgtaatgtctttttcgtctgtccctacatcaatgctgttacaccagtcatcatccgttccctgtacaatgacaacatcgttcccggacgttttaagagcctgctgatagatattgttgtttccgttattgctcatgttaacgccactgacagaaaggtttatgacctcggcccccgtccgttctttcaagatatccccaaagctgtattgagcgcgtagcccgtgggccacactatcccccaaaatagcgattttctttgcgttgagcagattgcttttcttaataaaatcaacactgatatggccgctgtcggtgatatttaaaagctgatttaactcattactattttgtgagtatgctgtttccgccgcgattcgttccgataaagtggcgtgtttgacgtttttactgtctgttttcgcctgttccacttgctccgtaacctctaatggtgacatttcgggagcaattaatgccctgatttctctatacatttcttcattattttctttgatcttttgctcaatttctttcatattactatcggattgaaaattgtttagagcatcttcaatcttggtgaaattgctatctagcgcatcacgaaactcaccaccaagacttgttggtaagtctttatttaactcaatcataaatcttcccctttcttcatcacactcaatgtaccatcatcatttacaccaatgagaaacgctgtcccatttggtgactttaattccaatgattgttcaccgagctgcatagtcttttgtttgtcttcatctgtgtaatcatttttagaaagtgtatatcctgattttttatcaactttactatctaaagctaattgagtagccgtgttgatatcatcggggttaaatccaattacagcgctcatatgtgttttagggtaaaacggaacattcttcgaatccctcaactgcacaatatcagtcatttacctcacctactttttccaagatcaatctggaattccaagtgattgatacagcattttggatattgttgataatcgtatttgtcttactcgatttctgatatgctaagttagcctttttagaaatttgttgttgaacggataacatgtcctttttagcattacttagtgttaattcaattggtttagaatcatcaaacggactatccttgatcccaacaatcggaacatcgacatctaatgccataggctctattatagccatccaaacctccccaatttgcggagtgtctttcccataatagttgagggtgaatgtggtttcaggtacatcttgaagtgccttaagagcttgctgatctgtatacttttttgttgttgcatctgtgtccgttgaaagatcaaccggttcactaaacgattccccaaaccttgaaacattgggtgacgtgtatatgtaaggttcaaagaaatagttgtcatgttggtctttataagggtaaacccaacacattgtgcgtatatttgttttgtctaatgacaagttaatatcatccgtattgtacaaccagcgaaattgcttttgtgtcaattgcttaaagttggcttcgtccataaagattacttttttattgtccgccttaataaaacattcaaaggtatctattagggtattgataagagttacggaatcagagtttccgaattcagtaatttttttcttaatcttgaacgtgcctttgatttcataggtataaccatacttgtttcctttaaataagtaatcaagatactcagccaacgtgtgctcaggtttactttcttcgtcgtaatcagcatccaacacatctttaggtcttattttcttttgaatttcaaaataaacatgagttgctgtaacactaagtgtttgagaattcccgtttactactggattaatttgttgtattacaaactcttgtccattgacaattaaagacgcatcgtcactttgaagaagattaaacacaaactcgttgtgttttgtttggactatgttgaatgttacttgccagttagttaaattgttttcaacagtccgttcaaagtctgaaaaccctgtaacaatttcttcataatctttagtcttaactaaaaggatttccataaagaacacctacaagtaaaggaatcttgtattaaaagctattactgggtttgagcaacctgtaattaaaaattgattccaacctttagcaagagtaatgacaccatgatttgtgtcacgtccacatctcgaattattcaaatagggatcaaacccatctaacaacaaagcatctgaagcattcatttctttatttagtttaaagacatcgcctgtagttttgtttgtgataacaggtttacctacacaagttaatgcaatttctaacatgttgtatttcaaaggattaattgtaatatccgaagcattgaacactgaaaactcacttgtgttaaacacatatgacagttctttatctgaaggtaaattcataccgatttgccaggatccatcattaaaaacaaatggtgcttcaagagtggttttcactgcttccctaaaacccgaaggcaaatcaaattcaactgtaaatgacatatcaaccatgttaattctggtcgtttcatatggtttcgccaaaactctatatcggatcccaggcattaacgatgttctaatatggtatgcttctctttcaaacaggaaggcatgaatagctttacaccctaattcaaaatcaaataaatcccttcctttaaataaaaaattggcgcttactgtacgagcaccataaactgctttaccggcttcaatttgaccatctagccccggattagttaaataattctgggttattgatggagcagatactgtcatatctaaaaactgcagaccacgtaggtctacagtttcagataaaagttgctcttttccgtttttctcaactattaaatcttgaagtatactcacctttaacccccttgcatgtaagaattaatccctagagcatttccgtttacttcattcaagaatttggccaacgttttaagaatattcccttcgttggtattcatattttgtcctatggctgattgtaacaattgattagttctttcttgagagaacagtatcttggtaagaaggtcttcaatcctattagtgttagactcagacttcttattaggcaattgttcaattgaagcatttgccatcttttgcaatccgtttatagctgccgttccatctatcgggataatattttttgtgatggaatccgagacgtgaagggccgcccgcgaaacgttgctgatgctgccagtcagaccattcacaagaccatcaccaaagaaacccataagccgcactgcaacacgagaaggcgaatgaatatctaatctcttccggattgaattttcgatattgtgtgcgattttctcggcagcagatgaaacatccttttgactctttttcaacccatttacaattccgcttacaaaatggccgctgagtgttatcccggtgcttttatattttttattggccgatttcatggcatttcccaacgtatttacggcatcattcacgcttgattgatatttagcctttgctgtttttaaagccttgttaagatcagtttttgcaccaccgtatgaggttgtgagatcacccaaagcatttgctgtcttggtcttttccgagtacgctcctttgtaagacttccagtcacttgcagacaggctcaacaatgcctctacgtctgcatttgcggaaggcccttgttgcagcagttcattaatcatctttttagaggcgccgcgccgctgtaatttctttatattcgatgtgaattttttataaagagaattttgtgatttaagattacgcagcaggcccaccccggacactttcgattgttccgccttatcaaacattgcaaaagtcgtgtacgccgtgtttctgttttcattcaaagccgattgatacgtttttttcgcatctgccaccgcattgttatatgttgttctgattgttttcattgtgctgtcaaacttattaattgcgttgcctatcgcgttattataggagctgatttgctttgcaatggctttacttgacgcaccaattgccgcaacaatgcggttacgttgtgtcgctgttaatttatgattcttttgaatggcttcaagtcgtgccctttcggttttggctgaaattttcccggccctgtaatctgtaatgatcgttgaaatgctgtcagaaattttcttactgagttcagccgcttttttctttgccgctgctgcagccttttgtttttttgcctccttactcagtgttttgttgttggccgccggccgtgtcacatactttataatggttctcgtttttgttttctttgaggaacccgattttgttgaatgacttttgggttttttccgccaatatccttttacgtaggttccgttatctcggtaatagccatcaacccaaacctcatttgtccctttcgcaaagtgccccacttgctctttaaacgctttaatagacggccatactttcgtgccttttggtaggtttgcgaaaagagtcggcacgttcggacttacaccaaaccggccctgtggcgttaaatatggttcacgctgcccgccgtcgcccaaaactgccgggccgccgttatgatgatccgtaccggtagcatatccgatgtatttacgtccatgagccagcgccttaatgccgggtacattcgcgatcccgtgataccttgattcaatatatccgattgctgacgctacctggtctatcgggttcagccattgtttatgaccagccttggcataagatgcaaacgttgtttcaatcatctgcattaacccggcagacggatgaccggcccgccagtttgaatcccatttgttcacatgggaaccggctgtgccaccggattcatgtatcgctattgtctctaaacctttttcccatgcggcgccgcttacgcctgcaatcttcattcctttttttacccatgatttcagggagccggaaaccttcacatcgccagtatcaatgccgccggatgcaaaatcagtcagtttgtctttcacgccgctgataatctttttaattatcccttttcccatatcaaggacggagccgcccagcttcccaagcgcggagccggcgaatttagaaacaaccgtatttaataatttcgtcggatcggataaataatcatagatatttgatccaatgtctttaagtttgctccagccgcccttaataaagtcttttgcagaaccgagccaagttccaattgaaaatttcggcagtgtcccgcttttcattaattgttcggttttgtcaccgcctaaaattgacgtacctcgcggtagattcatgacggtatctgtgtttggagatagggccatttccccgtttggaaaacgcattaattcatgtttaccaccatcaccaacatgagcaagcccgccggcgaatgcgttcggatcaccctgccatgttccttttgcaaagtaaggaatatgtttcagtttaacgtcgtcgatcgttggcatatcaacttttttaagaacccagtttacaccgccaatgacgccatttgttacactttctacgccatcaatcagtttattccctacaaaaatcccggcatttccaagcgctttagctccgcttttaatcccgtcagccatttttccgggcagtttcttaaagaaagaaataatatccccgccgactttagaaacctttttccacatcttccctagcgttccgcctgttattttattcaagaaattaaatccggccttgaaatgtgatttaacaagcttcacgccctttttaacaatttctttaacatcgtcccaaagtttgtcccatcggccatgaaaaaaatcagaaaaggtttttagaatgctcttaattaattttgttgcgctgttaaattcgtcctttatatccccccatgtatcgccaaaatgcttagacaatcttgtaaaaagctttttgcagtatttgaccgatgaagaaaaagctttcttcacgcccgaccaaacagagtcaaccacttttcggaatcccttaaagtgtttatacgaatagataactgcagctacaagcaggccaatagccgtaataacaagcccgatgggattcgcttttaaagcaacatttaatactctttgagcgaccgcccatgcttttgttgacgctgccgcgaccctttgagctgttgccactgcaagtattttcactttttgtgcaacccaaataccccctgttttcgcaaaggatagagacgcttttgtcattgtttttatgccttttgctgtagcttttgaagctacaccaataccgacaattgtttttttgataccagtagcaacaagacgagccgtccatttaaaagattttccgatggccttaccggaggcagtaatcccccggcccgcagccttaacacctgaccacgccagttttccagtccacttaaacgctttgccgattccttttccgaaaatcttaattaatgagccggttttcttcacaccgctccataccagcttgcccgtccatttgaaggcttttccgatccctttgccaaatattttaatagctgaaccggtcttctttacgccgccccatgccagttttccagtccatttaaaacccttgccgatcccttttaaaactttgttggtcttcgttccttccaatcttgcatttttgaagaaggtaaaaggtgatttcgcaacaaaggagacggcccgacctaaacccatgaggccggacgttgtaatgctgatagctttaaacacagcccctaaaccaatagcaagaggggcgaatactgcagtcagagccgcaacggtaccaattgttttctttgttttgggtgacagattttcaaatttcacaagtaatttattaagatgctttacaagcgatgtcacagacggcagcagggttgctgatacttccatagcaaagtttttggatgtttctttgaaaatatcaagctgctttttccctgatttcatcatgcggtttgtaacggttccggcataatccgtcttttcggcattcttgattttcgcagaaaacttgtccaggtgctcccctgattccgtcattaacgcggtaatagtaggaagggaagtccggccaaacatgcgggaaagtaaattccctttttcctcggttcccattccttttgttttttcgcgcaactgttccacaatttcggacaatctcaacaagttcccgtgtgagtcacttgttttaaggccaatgtcgtgcattgcattagctgcctgtcttgacggcttaacaaggctagccataactccacgcaggccagtaccggcggacgttccctccacgccgcgccttgacatgacttcaaggtatgctgccatatcttccattgagtagccgacggatttagcataatcccctacatagttcatggaatagcccaattctgtgaatttagccgatccatgatccgccgcgtaagtcatggcgtttgtaactctcgtcgtgttctcggccgtctttgccgctgactttgacttgtcaaaaaattgctccatgacgttcatagaaacttttgttgtttctttaaattcagatcccgcagccgttgacgctttaatcattttttcaaccgcagcaatggcttgccggccggtatcacccttacggatcatggtttcatacgcatcaccgattttttggacagaaataccgtattttccggatagctccgtcgcttgcttttccatgtcctttgtaatctctccggcctctttcgcagattccccgtcagattcaagcaaggacttaatgtccgtcattttccgttcaaattcaacggcctgctttgttccgtaaacaaatgcccctccaatgccaaatgtggctgctgtcattgaatggccggcactcgttaatttatcgctggcccggttcacagaatcccttaatttgttgacgttatcgcgaaacgttaaactgagttttgaagagctacccacttgcctattgagtgttttataccggctgacagcagatgcttgtgccgcttccaattccaaaatggctgtgcgttgctttttggttgcgatattgtcggcgccttttttctctattaattcctgtagtttcagcttttctttttcaataagctggttacgttccttaatctgatttccaaggcccttgtattcttctttattggcccggagcgctttgccctgggatttgaatttgttgatcgctgccgttgtttcccttgttaataaagacaggttttcccgtacaaggcttgtccctctcttttgatcattcatagcgatctcagtatctttcaattcttgacggtaaagcgcctgcctccgggttgtattgttgatttgatttgcgtaacgcatagccgcttcgctattcttcccatacttttcaacggccttgttatacgattctgtcagctttttaacttgtacgtcttgtatcttgatcgtccggcttaatccgtcatactttgcgcccaacatgcctaattgatccccggcatttttgaaaatttgaaactcagctttccattggctggtagatgccgcaacagtgtttttaatagcttttaaactttgcgttacttttgttccatctaaaccaactttaatgacaacaccctcggccatgttctccctcctttcttacgtaatcgaattaaagaattcttcccccgtcatcacatgcgcgtcttccgatagcacatctaaaaggccgtaataatctgcttcgtcgatatcacgaaacgaccatccggcctccatcaaatttctatacattttttttaagtttctgagggcctcggctgctgttactcctgtgcctttagcgctacttcctttaagccctcttcctcgtttcccatgacgatatccataatcccctcaattgttcgcataagtttacgtgcgtctattccatcataaatagaatccatcgttactttttcatcactgaaaacatcggcaacgaacgtgaccattttatctaaacgtaccgcctctgacagattttcatttttatccatttcatcctgcaatgccaacgcttcacgtactttacgactagatataaacccctgttcatagactactttttcacctttttgattgagtaattcgattcttaacatgttcatttctccttttcggtttcaatttttcggattaaaaagaggccgggatttccggccctgcaaagtgtgattttatgcagcttgtgtatcagaaggacggataaatttttcccatgcttcctgtgaaaaatctttatccccctcgtttgctttaccgtaaaccagcccgtcagaagatcgggcaataaattcccctgaaattttatcttgcgccgtttgtacgtttgcatcatttgtctttagatcggaatccggcgcgccgaacattccttttaacagaccaatatggagcttatttccgtttatatcagatgataagcattccacagacacaaaccgcggcttcgtatcctttccaagctgatagattccgtttactttttccataccggtaatttccgacaaacaatcatccggtaagttataaatagacagctcgcattttacatccccggtgccttttgcggaaacgtcaatcgccatgtttgacgcgtagtttttcgttttagtcggtgccaagcctgtgatattggcctcaactacgccgtttttatctttcttcccgtccaacacgaattttttatctgttgctttttcgttttcatccaagacggtaataacaatggattcaaaacctacagtcgccatatattatcattcctttacttaattttttgtattaaaaaaagccactggctgacagtgactaattcacacttgtttttttgaattttgccgttaaatagagcttttcaatatccggatcaacggatatgtaactctcgaaagaataaaagccgtttgactcaaagtaaccatttagtaagtcgtcatattgttcagccaaactgtcgtcatactcataccaaatttgtatttgcacagacgtttgaatttcccgactgaaattacttgcatatcccgcccttttgttgagaatatgacttattttcacaatggcgttctttgcgtcttttaaacccgtgccgtccgggaggacaaccggaaccgtatgcataaacacgtaatcctcattaatcattaacgggttgtcctgaacagtgagaaggtcataagcttcagtcagtaagctcataaaccggcaacctccgtgtcaatgacgtgctgcatggttgccgttaccgtctcccttgtttctgccacggttttctctgcgaaatgctgcggcggctgatgaattgtgccgtcatttacaaaatgggatctccaagccgtatcctttccatagccaaccgttacctcgcccaatttgtcaggctttgaaattacgatatcgtcacgcatatgtttaaactcatgggattcccctgttttagcctcaatttgccgctgtgctttccatttccggtcagattcattctcgtaaggggtatttacctttaaagcttctttaacgatcatagcgcccgctaatgtcgcttttacgcctccactttttgtccggtaagccactttacggagttgagcatctaaaccggtcatatctacttccacactcatgttatcgcctcacaaatgatggttttccattcgtaattaacggtatccggttcaatgtctacgattttgtattctgttcctttatgggagatcgtcatatcatttgtaattttaaaaggcagattttgacggacaacaaatgttattttgttggtgataccttcccccaggttattaattcggtcttttaagcgttgccgccacaccgcggcccaaaccgtagcaacctcaaccggccccattttcggcaccccgttaattttggttgatttttgaacattaaacgtaattcgctcgtttaagtcgcctgttttcgctattggcaccgttttttaccttccttcttgtttttgcaattgtcgtaaatacttgcctttcaactgtatgatagagggcgtaatcccaaatgggatatcacgcacctctacgccgtttgaagtagcagaccggtttttataatagtgatccaccaatctcataactgctacgtcaaaaatagagttatcatcgtaaaaaccagcaaccttatcccctacagcagaaataagggtgtcagccgcagccttaatatatttctccaataatttgtcatcagcgtcagtatcgatccttaccgccgctttcacctcggacagagatactgccatttatctcactcctttaccctgctgttgttgcggatgctgctggcgtttcatcggcaatacctttaaagctcgcaaaaacaaccgcttcctcatcccacaatttcacgtcaaaccggtcaatagcgcggattttggtttgatctttttcaaaagcgccggcgccgatatttgtcatcatgatagaaagctgttcccggtcaaataaaaccacagcctcttttaaatcaccagcaaatagagggtaaataggcgctttatctgttccgccgtttggtaaatatttgtctgaaataaccttgattggcttatccaataacattaattctgttgggttctgcgggttcggctgtagcaaataacggccgaatgcacctttaaccttgtccaaaacattaaagccgctttgatttgtaataaaagatgaagtcagtttgatagctggatcgagtttcacattcataacgtctttgatatcatccacatttgcaacggtctttttctgtgcatcaggcaggccgtttaatacttggataattttcgcattccgcgttgctgttgattttttcgccaaccaatcagtaatccacgcgataatttgttccgccgactcttttaatagtgtgttagtaatggttgaaatgcccgcataccgctgaattaagtatctcagaatgcttgcagatggatcgtcattctcgtttatttcatcgctttcattgtcgatatttttaaacggtgttacatcgcttaatttttcaatatttcggcttcctgaaagggacgttaccggcaccacattaacgtattgttccagggcatcaaactgacgttttagtttgttgaccgcagtttggatatcttgcgggatcgtcaagccaatcccttccccgttttcatccagtttggtagtcacggccgcgctcggtctgccgctcaataggtctttaaaatcttttataaattgatcttttacatccgctgccgtagaagggatatacggggcctgtttcgcttgtttaatagctgctttttcggcttcttccatctgttcttttgcaatgtctcgtttcgcctgagctgcttgtagctttgcctttaagccctcgacttcctccgcggttacttcatcgtcaacaagtgcaagctgtaaattgtgttgtgcatcagaaacccgctgccccgcattaatccaagtattttttagttcttcatatgtcatcggttaaactctcctttaagaatctgtaatttcttattcagtaattttggttgtttggcgtctatagattcaggttctttgagtgcgtgcggcacatttcgataacgagaaaataatgcagaggaaacgcaagctgccgcttggtttgctgctgtaatttcatccgcaagaccgtaagaaacggcttcactagcagataaccacgtttcgttatccatcaaggaatctaatgtttcctttgtcaatttgtcgcccgctttttcaagatatgacgctttcattgactcagaaattttgtcaaggacatcagcctgctttctcatttcattggcgtttcccatcgctattgtccacggattatgaaccatcatcatagcgtttgagggcataaaaatagcgtcacccgccattgcgatgacacttgcgattgaagcagctaacccatcaatatatacgttaacgaatgctttatgctgtttgagcatggagcagatggccacgccttcaaatacagagccgccgggcgaattaatgtgtacatttaaaacactcatatctcccaaaaggtctaaatcctgcttgaatgaggcggctgaggtatctatttcatcccattcataaccgcttgtgaccacttcgccaaaaataaaaacatccgcgctgctgtcaccggatgccttcatactccaatacttatttttcgcctgattttttttcatttttgctttcaccccctttacgttcagaaaccggcgtttcgattgggtacaggtcgccgctaatccataatttattagcgttttcatcaggatcgggtggctgcccttcctctaatctcacctcattggggcgcatccacgaatttctcactgccgtttgatagtatttttgtcgggtctctgtatcaccgcgcagcagtgagttgacaataaaagtaaacttatagcctcttcgcttttgatccggtgtcaaaatctttttgttcagctcttcttcatattgtttgagggtaggcatcagattgtttgttacaaattctaaattaagctgctctaatgatgaaaagctggatgtattatcacctaagaagtgctcaggcacgttgtacaccatagcaacacgggatcttgtcactttatcaatatcaatcaatttcgggtctacaacttgacgctcaacccgtgtaattgtgatcccgctttcctcgaccagcaaaccgccattatctcgataaaatcccgctattgctttgatatgtgcttccttttggtcttcatctaagcttccatcaaaccttacaataagcccctcatttgtgccgtttaattgattcatagatatttttcttacttcgtgatcatagtcaatcgtgttctttaacaagtcaatagggttcatccccataacttgaccaaagcgcgcatgtttaaaatggagcatttcactgtaatggacatacattgtttgttgattgggtgcattatcaatggatgaaacggcataatataactcaccagacgttatatcaagcaccggctcacaacacccaggctttacgagggccatatcaacaatttgcccgttcacattgcggaataactgaacaaaagcattcccctttaaattccggattgtttcaatgtctctaaaaaaatcgaatcgggtaaagtatcgcggcccatccctcagcaaattaaagccgtcacaatcagatggctgctgaaaattgtcatcaaataattttaacggcagactggcaaacgtatttcccaatcggctcactgcactgaatatcgcttcgttcatatctgaagcgctgctaaaatagtccccttggaaactcatatgatgcgtaaccggtttttgaaacgtgacccggttaaaaaaacgtttaaatatctcctttaatcccaaagcctcacccccctacatgttttttaaatcggcaacggaataatacttcactttcccggactttttcggcttgatcatcataggaattacaaacgtatgggctgttaatgccgcggccaccccgtcaattttgcgattcttggattgtttcgtaggcatccagttattatttcgatctttgaccattcttacattgttcagataccaacggaaaagcttgttattgttaaaaatgactttcccatctaacatcagttctttaaagttctgcatagggccgccaagcgttttaaatccttggattactttttccgtttcaaaaccgtgctcttcaagcgcagcgtttaaaaatagcgccttggccttgtcataaccaattttctttatcttgtacagtttggatttctcaataaaccaattcaacacaacctcgtaattgacataatcagcctccggaataacggtcaaatatccttttttcctccattcatctaaccgctgttgattattgtcccggttatatcgggcttctggtatccatgaatgagttaaaaagaatatctccccgttatcaagcggaaattctaaacaagcgctggtaaaatcctcagtttcggacaagtcataaccgccgacacattcccggcccttcagcaagtcaatgtcaatttctttgttatttttattgatcgtagcaacatcaacaaatgacagttcatccacatcactgaaaatattaaattgctttgttaaccagtcggccagctcctgcgggttttttctatcctttttgtagtctgtcacgaggtttacaaagtccataaggccaatgtttggattggcttttatccacatccgcggatcgtccgcctcttccggcttgtccagcttcgccagataataaaaagtccgttcgtctaaatcatcttcaaggttttcaaggcattcttttcccgcctcaaagaaattcattaacggcccatctaaaacgtagccggcagtcgtgatataaataattaatggctgcttcctcataccccttgactttttcatgacattgattagtgcataatccacatattcgtgaatttcatcaaatacagcaaaatgaagattttccccatctttattattcttttccgctgacatggcttgcattgtgcatttcatagtttcgtaacgaatctcacttcttaatgccttaaaacgtttgtctaaatatggggaattctcaatcattgcctttgattcattgaacagaatagatgattgtttttgtgaattagccagaacgtaaacattggccccgcgctctccgtcaaaacccaacatataattagaagtacctgagataatcgttgttttcccgttcttccggccaacaaaatccacggcctcacggtatttccgaattcctgtatctttatgaacccatccaaaaatggagccgatgacaaaatgttgccatggctgcagaacaagttgatcgtagtcacctttcgatggcctgcacttcttttcgataaacctgacagggcgatgccctttctcttcatcaaaaatccaaggaaaatcatctgtaccctgccgctctaaatctctcatgtgtcgtttagcagctaagatattttcctttgatgccgggattgacccatctataagccgctctgcgtaccatgttgttagtaattcgggataaggctctacaaggatgccgccccatgattgttgttccgcttgataatcagcccaccacttggtaagctccgaataactcatgtcaagcaagggtttagaagtcatcttcttcctcttcttccccgctctccaatttaattgctaattttacacgcgctgccggcgacaagcctaaatccgaaccatacgcccgtagttgcgccgccatatcttttttacgcataataaaagggttgggctttccatcaacccacaacccatattttttaatttgcctttcaaatgaaatgtattgagaatacgcgtcacaataaaaggctaaatgtgtgatatcggcctcattgatcaattccacttctaaaagaagctcagtcagccgtttaaattccttttttgcagtagcagacaaccaggaaggcggctcgatattttcggccctcattttcattttctcttcattttcaatacgtttttctaattcggctttcgtatagcggcttttattgccgtctaataatgtaagtttggcactttttgcaggcatagccaccgctttcaccttctttcgaaaaaaattcattttcaccctttacaaattgcggcccccgatatacgataaacccaagagcatcaaggcttcggccgggatgctctcttctgtttttccggggcgaaaaatcttcaaaatcgaatttattgtataggaaggggcacaccgttgtttgaaatttttattccctcttgtttaaagggtagggggggatgttttagcgcttttttaaatgatttcgttgttcccgtagaatttgaaaacattttcgttgcgttttttcttcttctccccgccgcttctttccgggtgctccctgttgtggcactctaaacagatcgtttcaagattatcaagatcaaacgcccggctcggatcatcccttaatgcaatgatatggtgaaccgtatttgcctccgttatcaatccacgacgccgacactcacaacacaaatagccgtccctaatcagaacgactttccttactcgcttccagcgtgctgtattatagattttgtctaactcatcacgttgccttgccatgcttattccttttctgatttacctgaacagactacacacgataaacagaagaacgtgagcgaaataaaccatgacgtctcaaatgggtgcgcataaattgtttccatgctctatctcctttactcaacataataaaagcttcagtggaaagcggcttgggcgttggcatcctttcagccgcacacctcagattctttcctaattcctcaaaggcttgaccaattgttttcatgtaatctctccaatcatattctttctaaactgctcccgcactcagcgttaaccgccaattgttctccctgagatttaccggacgcagtttacagagaatataaaaaagcaccatcccgtagaatgatgcaaactgttcaatgcttatctttaacttcttttaactcttccattacctcgtctaataacaacttaaaaccccgctgctgttcataatatctcttacttttagttgtgatatgcacccacgtcccaaacattataatagcgataaagacactaaaatataatattaacgaagctatttgttctccaccttcaacaacagtattaagagcgactccaaaatctatcttattttctttatccttttgtaacatagtggtggtaaaactattaatagtattgaaatagaatgtgaacataacaacaaagacactaagcactccggcaagaactgatgtaagtaatgtaaaaggaatagttttaagagagcttaaatcatttgatacactgagattcgaatctaatctattaaccatcagtttcaattgctcttcactatgatctctttttaatgcttctttaacaaccagctgaatgctcagattttctttgtagggtttcccgtatctttttcctaggtatttcgatatttcttttgcttccatcaaagaatggttttgcatattatcacctcaatcccttttatcgacaaaagagcatgacaatgaaaccatccgcaaaatttgtcgaacgatttaccaggagcagtttacatggaacataaaaaagcgcccccgctcatcagcagtgccgttcccttgatttattacctactaccataatacattatctaaaacaaaatggtgtgccgttatcgtgccagctttctgccaaaatcgttttagtacattcctttttgctctgcagcagtcagaccgctcacctcctataacacgacgacaccacgaaaaacttacaacattttcctcataaccaattaattataacttatattatgtctaatccctctcttttaagttaatggtagtgttctctagttagaagaaaaaaagcacacctacataaggtgcacttaatctctttcagttatacaagttgatcaactaatgatacgattatttgagagccttcaaacaatttattcactatgaatacaagctcatctgaaccatttatgttatctccgctttgaagtaatttgattagcatcattactccagttagaatcacctcagtcgcttgtatataaattttccataattcaggctccacttccctaaatgcatgttttgtagaatgtagattttccatatgtttaactaactgacttaaggacgcgagcagctttgaatcttccgtagtaacttctgacactttgattccatctttaattaacccattaattgtatgaatgattaaatctatagaatctgaaatttttgtaacattttcaagaagaagttcaatgaattcatcttttgacatgctgtcactcatcgcttaacacctcttccgcactctggacagaatttatattttattgaatgtatggtcccgcaccccatacacctcttgctatgtactttatgacactttgcgcattttaaaccaccgattcttagtggtgtttcacagctttcacaaatgttcaacccaaaagagtgaataatagcttcttcaactttctttagattactttcattttcaaaacgccccatccttacgtataatctgtttttgctaattgccctagcctgattacataaaagaaaccctcctgcattagcgaagctgtttcctagcctttcaatttctgttatagcctcctgtgaaattagccaatcctctttttcaaattccacattaaatggatactttttaattttttccccgggtctagtaataggcacacatatacagattggagctgttttattcataaggttattagaaataacaaaaaccggtcgagatcccccttgttcagatcccttaaccggctctaggtcagcccaatatatgtcccctcgcgaaggatcagtttttttcatttaatcattattctccttcattagcttatcagcttctaatgaaatgtttgtgaagagctcagaataattcaagtcatcttgatcatccgaataagcttttaaatacatatcataatactctctgtcttttctcttctcttcagaaaccgctaaatgatgagcatataatttcgcaattgaagcctttagagccattccagttacatttaattttagaaataagtcacgattatgagcaacataagtcgccataaacctcaacctccctttgttcacattatcacctagctttctttttctgtcaatttaattattatttccccagttattaccctagaactgatttttattccaactgcacttcaaactaacaatccaaatagaattttctactttgttacttacccgttacaatataaaaaactcacctgccgttcaaaaaaatgagcttataaactaaagtcgttcattgttctatccgttgtgtcttgagtgatacccgtttacttcaacacgatgtcggggctggattggttccctgcagcaaggcaacgtgcgttattgattctgtttttttgtcttttgcttctgcagatcgatatatacacttcacgtccctaaaccttaaaagccgcatgtctgatatacactggtctgaattaattccatccataaaaagaagatgatttcgttagctccgtgcttcaggtactttttaatataataaatctgatctaaatcccttatcggttgaacaaaattcattccggcgcgcctccgtccttatagacttccacacgaagagcaaaggcaagccggtaaaacgcttttgcttttgcccggtagtagctgcgctggctgagtctcatttctgcatagacctcataatcatacatttcttcattctgcatgtagagcatgacaagtatttgccgctccttttgggaaagccggtttactgctctttgcattctttttaaaaactggcccctcttagtcccccaatccatacgttttaatgctgcatcttcagtggaagaatgaaattcattcgaaaagctgggaggaacaaggctatatgctggtgtaacctttggcaaaaaatcatctggcacctgtaagagatataaccggtattgatccagcagctgctctgcttttgctttagtggcttcttcgtcaatctgaggcaggtttaatgtcatttgattcatatttacctcctgattattcaaattaaaaaggacaccgaacaaacagcgctattgctgtaggttcagtgtccgcaggctttccatcttggacttgtattcaattaaacaattcaccttcgtcccatttaacgcgggtgacctttccttgatttgtaatgatttttgtttccccatatgttgggagcggaaccatccttgcagctccattggatagaataaccgcaaaacaatcatgctgttttgtgtctatgacaagtttatctctttcaattatatgatctaaattgattaatctcaaactgtttcactccttttaacccgctgctcgtatgccaacaaataagcgttcattttatccttaaatctttcctgcaaataaaaattaagtgcctgttctggatcctgcagacttatggttttcttctcataaaccaaaaactctatcagcagaatgagagaatagtaattatgccgcagcgcttctcgataccaatctctaactgtcaaatctacgctccaaatttaagaacaagccatattctttaatgaacgctagtgagacagtaccaacaggaccgtttctctgttttgcaataatgatttcgattatgtttttactttcgctttccttgtcataataatcatcacgataaagaaacccaatgacatccgcgtcctgctcgatttgccctgattccctaatatcagacatcattgggcgcttatcctgccgctgttcaacgccccttgaaagctgactaagagcaatcacacaaatgtctaactctcgtgccatatgcttgagcatgcggcttatttcgcctatttcctgtgttctgttccccctatgttttgctgatcctgtaatcagctgcaaataatcaataatgatcaagatatctttaccggcatactcccgtttcattttccttgcctttgaccatatctcatttactgtgacgcccgggcggtcaaatattcttagatcagcggaaccgagaataccatttgcttgtgaaagcttgttccaatcattagccgtcaaatttcctgttctcattgcatctgcattgatatttccgagaattgaagccattctttttaagagctgcttacgtgacatttcaagagagaatatacctactgcgccgccactatattgatttaatgagctacccataaaattagccgcaacatttaagcaaaaagcagttttcccgaccgatggccgagcggctatgatgaccaactcttgtttttgaaaacctgacgtcattcggtcaagctccgcaaagccgcttcgcatacccgtaatttccccttttggggtcgctagctcctcgtaaatgtctaacaggtcattttgtattgccccgtcctcttcatcgcctgtagcgtcttctaaacgcattaaattggatatgctcgtttgaatagttgaggacacatcttcatgagcggcattatgcttaatttcctccgcgatcttgctcatttctcttttttgccaatactcaaatataagcttttcgtaaaaggaaatattggcggtagtcggcaccgactctgttaagtcggataaatatttgtgtccgccaacgctgccgatgttgtcacgtcctacttgctccacgattgcaaccaaatctatcgggatacctttagaatccagctcaatcattgcagttaatagatttctatgtttgaactgtgataaatggagcggcttaatccgactgtcttttattagttcaggctctaaaaggagcgcccctaaaaaggactgctccgcatctatgttgtataaaaattggttcgtgtccatttaatcaccgatcccaagcattcgtctgatttctgcttttgatttctctatggatgcccgctcttgttctgttaactcagcaggagcagacattttcgcaagatactcttttgtttcctctacagagggaattgcattcatccggtcaactgttgtaggctttgcattcaacaagtctgcaaccttcggcggaaacttattcaagcggcaaaagttgattagattgcggcgtacttcctcgtattcagcttcttgtaaaagctcatgccaagaatcaatcttttcttgcgtaatctcaaaatgttcaaagtattgcttgataagagacataatttcgaaggtttgttttttaatcatccaaattaaactcctctcctttaggtataacagttctctttgctgactcctgttctttatcgctcttaatcttggtcacaagcctatcaaactgttttcgaaggcttgatggacttaggatattggttttccaaaagctgtcctgttgtgaccacttaattaagtatttgatttgtttgtctgtccgtttatctctttctcggattaacctaaattcattagcccatttttcaaaattaggctttttagcatcaggattatttttgagaatttcttcaaacaaaaattccgcattctccatgtcgcaaatttcatatttgagacgagaagtatttatattcttttcattctttacattcttttcattcttgattgtgtgtttttgtgtcgctttcgtgtcgttttcgtgttcgatcactgtctttttttcttcatcggaatcatggtaaaccccataattgacaatggttataagcgtttttttggtgtcttttttgaaatcaatcatttcatctttccgtaacaggtcaagaaattgcgttaccttggtattagaccatgaccaacgctcaccaagtttacgaattgaggaaatgaattgacctctcttaacctcgtaaagctcgtttcctagaacgaatttattatctttatgactggcaatcatgagtaaatcgagccaagcttcatatttagaaaacttccttttctcttgataaatccagtgatcttgaacactcctatgaagctttatccaaccaatcattagaatcaccttgcttacttgtaaaaattcaattcatcgctataagccacttctcccatgagatagcgaaaaccggcaataaatcctgatataaaagcgtcctcgctctcatatgccgcttttgttgaataagcctcgtcaaagtcctgcaaaagtggttttaaatctgccggcagcttctcgcttaacactgcataaaacttattcattctttcatttgctttggtcgtttttttgtgaccattcaatattctctttgtcactatctaagggctcatgcatagactttgttgctatcaatttgagcatagtaaccatgccagcgtcataatacttaccgcacacagtcgtgttatttatatccgcaccgatctgttcaccaatagcagctatttttgaaggcgtacccattaatttcataattgaactctccttgcatttgatttattagattgatattttcgttaagtcgtggtattgtctatctgaataaatcaagaaaaagtgcggcaacactctttcttgatcgtatgtttgactcttacatcttagagtaatgtgagatttggccgatccttctctattgaggcgatgcggccatattcgtctttttcggctttatacattggaatcggttctttaataacctcatgtaatatttttgaagtatcaatctccccacttatgattcgatccattacacctctatagaaaatatcaaagaaaacatcatcatccggcgactcaatatttttcacaaatacctcaagcatgaacctattaaaatctatttcatccggcatattatcaattgtgtttctcatttcagccgctcttcctttgctatgatctatagacagaagagataaaaaatcattctttttcattttcaagaaatccattgacaagactaaatgcttttcaagactttctggataagagggacttaatttaactgctttttcaatttcttgcttaatttcagagatggaattttcgcccattttccctatagattcattcgctttctctaaattctcaatttcggttaaaatggaccacaaacgctcacgatatttagaagcggtgatttctccgcgattcatttcccgctgtaatcgtttgatccacaccaagctgttatacggactatattttgaaactgacataattttatctgcgttgaaaaatttgcgtagatcttgaatcactttttcaggaatatccgcctcagtcatgtgaacaaacaaatacatcaagttagattccgcgatacgatcaacaccacgccaaaaggctttgtatgtgtcattgatgaaaccatgaaattccttcgttatatgatccacttctacttttaaagctttgacacgactataaaactcaaatttattcatattctcatcctcctaaattaacggccgccatgttttaatccatgccttagcatcctcaaagtctaactttctcaaatccctgtatgaaggcactgcgaaagcgtccctaaaattgcggtaaatgcttgaaaataggcggcgtgtcccctctgggctgtcatcgtatctatcacgtatttcatacacacgctttttaatttgcttttggataacattttgttgaaaggagtcgatactcaaattgtcttcaagtctgcctaagcgtttgtcttgctcgatctgtttttgctcaagacggatcatgtgttgtaactgtgggctcaactgtgaataatcagtttgtaagtggtgctccatttcattaaatcttgtaacgtattctgctgtgaataacacgcccttttcacccgtcattttatttgcgaccatttcacagccttttttagtgagtaaaaagcaagggcgaatttctcctttgctgtcctcgtaagtagaagtaataaagaaatctgacgaacgcaattttgcgtcggttaaaattgtgtcaatgtatcctttaatagttctgattaagtccgaatggcgcttgcccgtcatttccgcaacatcccgactgtcggcgagatattgcccgtttaattcgattaattttaaagtgttattcatgttgtatcctcctattggtataatgtccctgtataagacagggggtgaaactatgctgagtaaagacatttataaaacagaagaagatttccattattattgtccctgtgcatttaaaatggagtcatttatagaaaatgagcttgaaacggatactaaatggttttttcatcgctgctactccttccataaggaaaagagacatacagcgatatttaagtcgtatgattttcctgattaccgcgattattctctttctcttgaaggaattctaaaagatggagaatatcagattcggatcgttcaataaattgatggtttgttgaaataaacactcctggtgctttttcctctaaagttaacatgccgattttctttctactctggctgttggctatttccaatttacagcagtcagagctttttttatctacaaaaatatggagattccctatcataattctcactatttcttttctcctcccattctttctaattccctgcgtcggacttcaactatttcttgttcctccgcctcacacatatgtacgcagtattctgtacctgcgctggcaaactcaagcatcacacggccttttagaggctgtgtcttttttgtcacctcaaacttcaaacctgaattgtcactcggtttttttgaaaaagcgaagagcggtccgctattgaacaaaaaatcaatgaaattgtaagttgcttcgatatctaagtccggttccgggtttattatttgaatgtcattcaacttcaaacttccattcattttcccaccacatttcttatagattggtattaatttcttggttgctctgaaagccatttgagtaaaaactctttgcattgtttttctggaaagagccatttctttccgacacgatatttcggaaatctttcatcataaaagaaagtctccttgataaaattcagactcatatttgtttgtctacatagctctttcatatcccaaaaggtgtatgaatctctggcctcattcaatttctcttcaattttttgaatacaaagctgcttaatttgttcttcattcacttgaacagataacaccgaatcactcccttatgatataagtgatcgttcctttttaggaacaacaggttcaaaaaaataggcgatcggtacgccaaaatgaaaatgcatcttttttgcatcctctagagaaaagtccccgccaaaaccatttaactttttactaatagtgttaggcttcacttttaataaagcggccacgtctttgtgcttaatttcattttctacaaagtatgctttgattttattgtatggttgtctatttctagtttccaaatcaccgcctccttccgttccgattaaggaacaactcaaatataaaacactttattttctgtgtcaacaaaaaatgttcctaatatggaatcatttttggataaaatgttgcatttaaggaacacatattataaaatattcccatacaaggaatatcgaataggagaagataaaagaatgaatgtatttggtgaaaggttgaaatctttacgtgataaaaacaaacaaagcataaatgaattggtcttagaattaaataaaaaatatgagacaagtatcagtaaaagtatgatatctcggtatgaaaacggacaatcggatccaaaaatggaaattgtacggatcctcgctgattactttgatgtatcctccgattatttagtaggtatatctgatatgcaggtcaaacctttgaaatttaaaatccatgaagacgtagagaccattgctgcgcatcacgagggagaagattggactgaagaagagctcgaggagattcgtcgctttaaagaatttgtaaaatcaaaaagaaaaaacaaccaggagtagtctataaatgagttatgaaaaccttttaattgaatcagaagatacagtaacagtattcgaaaagaaactcagccgaagaataaaaggtttatattcagatggcattgtttggataaataaaaagttatcgaatacagaaaaaagagaggttctagctgaagaattaggtcatcactttacaactgctggccaaatactcgatcagtcaaccgtacaaaacagaaaacaagaattaagagctagaaattgggcttacaaaaaattagtaccattgaataaaattattcaagcccataaagcaggtattaaaaaccggtatgaactcgctgagttcctaaatgttacagaaaaattcttagacgaagctcttaaaagatatattgaagagtacggattgtataaagaggtaaacggattaacaatctgctttcaaccattaggcgtaatcgaaatgtttgaaacctttcaagtataaaaaatttacctgaaaatcgaacatatattcttatttagaggtgttaaaacatggcaagttttcgcaagcattcaaacggaacatgggaatataggatacggtacaaagataagaattcgaacaaatacaaagaaaaatcaaaacgtggctttaaaacaaaaaaagaagcccagttagctgctgcacaaatagagacagatatcgaatattatggattcgctactgatggaaaagaaagcattagtgagtatttcagtaaatggctcgaaatatataaaaagccgaacgtcaagcctatcacttattcacttcaagaaaggaatgtaagacttaatattctaccacaatggggaaatctaaaactaaaagatataaccagaactgagtatcaaaaatggatcaatgagctaagggacgaatatagtgaaggcactgtgaggagaatacatagcatcatgaacactgcattaaatgatgctgtgcacgaatttaggatactgcgtgagaaccctgtcacccgtattaaaatcccaaaggaaactaaaaacaacaaggaaattaaattctttactgtagaccaattagagaaatttctaaatcaggtgaaagagcctcagaaaaattccaaatacaaacactcaatacagtattatgttttattttctctcatggctcggaccggtctacggataggtgaagcgctcgctctaacctgggacgatatagattttgaagagtgcacgataaaagtgaataaaacactagtctacccgacaaattccacaccttatctttcaacccctaaatcaaaagctggcttaagaataatcaaactagatgcgcacactactcagcttttaaaaaaacacagaatcaatagacacgaggttgttctcaaatacaaaaactataaaaaaccggagaccgatattgtgttttatcagcatgatggacgatggttgcgcacaaatgttgttagagaatacttcaaagagatatgtaaaagagctgatttgccaatattgtcaccccatgcattaaggcatagtcacgccgtgcatttaattgaggctaaggctgatttgaaatttgtatctgaaagacttggacattcgagcataaaaataaccgcagatacgtacctccacgtcaccaaaaaaattgaaaatgacgcattagagatgtatctgcggtatacaaatttataattttgtgggtgttttgtgggtggggcctccctgaaaaccagttaaccccctgctgtatcaggcttagcctatactaccttccatttcgaatttgatcaaacggttcatttcaactgcgtattccatcggaagttcttttgtgaacggctcgatgaagcccataacgatcatttctgtcgcttcttcttcagaaataccgcggctcatcaagtagaaaagctgttcttcagaaacctttgatactttcgcttcgtgctccaatgaaatgttgtcgttcaggatttcattgtaagggatcgtatcagaagttgatttgttatccatgatgagcgtatcgcactcgatgtttgaacgggcgccgtccgcttttcgtccgaagtggacgataccgcggtatgttacttttccgccctgtttagaaatcgattttgatacgattgtggatgacgtattcggtgcaaggtgaatcattttcgcacctgcgtcctgatgctgtcctttgcccgcaagagcgatagaaagcgtcatgccgcgtgcgccttcgcctttcagaatgacagccggatatttcattgtcaatttagaaccgatgtttccgtctacccattccatcgtcgcgttttcttcacaaacggtacgtttcgtaacaaggttgtaaacgttgttcgcccagttttggatcgttgtataacggcagtagccgccttttttcacgatgatctcaacaaccgcgctgtgaagcgagtttgttgtgtagacaggagcagtacatccttctacgtaatgaacgcttgcttcttcgtcaacgatgatcagcgtacgttcgaactgacccatgttttctgagttgatgcggaagtaagcttgaagcggtgtttcaaccttcacaccttttggcacgtagatgaaagatccgccggaccaaacagctgagttcagcgccgcaaacttgttatcagtcggcggaatgactttcgcccagtgctcacggaaaatgtcttcattttctttcagcgcgctgtctgtatctttgaagacaatgccttgcgcttcaagatcttctttcatgttgtgataaacaacctcagattcgtactgtgcagaaacaccggcaaggtatttttgctcagcttcaggaataccgagtttgtcgaatgtctgtttaatttcctcaggcacttcatcccaagaacgctctgaacgctcagacggttttacgtagtacgtaatctcgtcaaagtttaaagagtttaaatccccgccccactgcggcatcggcatgttgtagaaatgctcaagagatttcaggcggaaatcaagcatccattgaggctcgtctttcatacgtgaaatttcttctacgatttcttttgtcaatccgcgctctgaacggaaaatggaaacgtccttatcgtgaaaaccgtacttgtattcaccaatttcaggcatttttttagccatccattttcactccaatcttttaattgccgcctttttcgccagcgactcctttttcaagtgctttccatgaaagggtggcacatttaatccgggccgggaatttcgaaacgccttgaagggcttcaatatccccgagatctattgagtcgtcatactctttcccttgcatcatgtctgagaagatcttagacatggaaagggcggtatcaatatcttttcctttaatcgcctgcgtcatcatggaagctgaagccatggagatggaacagccttccccttcaaatttcgcttcctgaacggtatcgccgtcaagcttcattgtcagtctgatccggtcgccgcaagtcgggttgttcatatcgacgacgatgctgtcatccaaaacccctttgttgcgcggatttttgtaatgatccatgatcacttgtctgtacaatgtatctaaatttgcattaaaagacatttgtaaagtactcctttgtcttttggagagcttccgcgagcttatctatctcttcctctgtattatacagataaaagctcgctctcgcagtagcagatacatccagccatttcatgagcggctgggcgcaatgatgccccgctctgaccgcaatgccctctgcatcgaggacagtcgcgacatcatgagggtgaacatcatcaagattaaatgtcacaaggcccgcccgctctttcggaccgtataccgtcacgccgtcaagctgttcgaaacagtcaagcgcataggcagcaagcttatgctcatgccgggaaatctcgtcgagaccgatctcttcaagaaaatcaatcgcggctcccaatccgatcgcgcctgcaataatcggcgtgcctgcttcaaatttccacggaagctctttccaagttgattcataaagccctacaaagtcgatcatctcgccgccaaattcggctggctccatattctcaagcagttctttcttgccgtacagcacgccgattcccgtcgggccgcacattttatgggaagaaagcgcgaagaagtcgcaatccaagtcttggacgtcgattttcatgtgaggcgtgctctgggctccgtcgaccacgatgaccgcgccattgtcatgagcgattttagcgatttctttaatcgggttgatcgtgccgagtacgtttgacacatgagcgaccgccacgatcttcgtatggcttgtgacagtctgccggacgtcttctaacgaaagcgtgccgtcttcctgcatcggaatatattttaaagtcgcgccggttgcttttacagcctgctgccacggaatgatattcgcatgatgctccatttgggtgatgaccacttcatcaccgggttttaagttggcgcgggcatagctcagcgccaccatattcagtgaagttgtcgtgccttttgtgaaaatgacctcagtcattgacttcgcattgataaacttacggactttttcacgcgctccttcatagccgtctgtcgctcttgtgccaagagtatggacgcctctgtggacattggaattgtatcggttgtaatactgatccactgcctcaatgacagcccgcggcttctgagaagtcgccgcgctgtcaaggtacacgaggtcatgtccgttcacttgctgatgaaggatcgggaactgttcacgaatatcggtgatattcattattttactttcctttcgatgacggagacgagctgtttcttaactccttcaatcggaagctcttttaccaccggagcaaggaatccgtaaatgactaagcgttccgcttcttctttcggaattccgcggctcattaggtagtaaagctgaatcgggtccacgcggccgacagatgccgcatgtcctgcagttacatcgtcttcatcaattaaaagaatcgggtttgcgtcaccgcgtgctttttcactcagcatcaggacgcgggattcctgttcagcgtttgctttagacgcgccgtgctcaattttgccgatcccgttaaagatggaagatgcggcatctttcatgactccgtgcttcaggatataaccttcggaagccttaccgaagtggatgatctgcgtcgtaaagttttccgtctgttctcctcttccgacaactacggttttcgtatcgccgtatgtgccgtctccatagaggttagtcgtgttttcagaaatcgtgtcgccgtcgttcatcagaccgagcgcccactcgattctgctgtcgcgtccgcgcgcggctccgcggcggttgacgtatgttgtgacacctgctgacaggttgtcaacggcaccgtacgtcacactggcgttatcacccgtgatcacttcactgataatgttgaacacagcttctttcggattcaccgtgctgatgtagttctcaacgtaagtgacggagctgtggtcttcagcgacgatcagcacgtggttaaacaatgccgtgtcattgctttcatgaacataaacagcctgaacaggcgtttccacctgaacgtttttaggaacataaaggaatgctccgccgttcattaatgccgcatgaagcgcagtcaatttatgctcgtcgacctttacgccgtctttcatgaaatatttctcaacgaggtcgctgtgctcacgggcagctgttaagatgtccgtgaaaatgacgcctttgtctttcagctctttagacagagaaaggaaagcaggcgtttggtcacgctgcacatataacgttttgtcttcattttcgatgtcgatcagcgcttttgcttcatcagctaaatcttctaaagaagcaagcggcgcgttttctactgtatgcttgttgaactttgtaaagttccaatttgtgatttttgttttatcaggcttaggcagcggcagatcttcagctttttcaagagcctgtaagcgcaggtttttcagccaggcaggttcttgatgcttttcggaaaagcctttgacatattcctgatctacggatagtttcgtttccaatgtcatgtttatccccctaacgcttacgcttcttggcctacagtttcgtcttcaatgccgagttcttgtttaatccagtcatagccttccgcttcaaggcgctgcgcaagctccgctccgcctgatttcactacgcgtccctgcatcataacgtgaacgacatcaggcgtgatgtagttcagaaggcgctgatagtgagtgatcattaagcagccgaagttttcgctgcgcattttgttgattcctttagaaacgactttaagcgcatcgatatcaagacctgaatcgatttcgtcaagaatggcgattttcggctcgatcatcataagctgaaggatttcgttgcgttttttctccccgccggagaagccttcgttcaggtaacgctgagccatttcagggtccatttcaaggaactccatgttttcgtccattttgcggatgaatttcataagagaaatttcatcgccttcttcgcggcgtgcgttaatcgcagagcgaaggaaatcggcatttgtcacaccgctgatttcacttgggtactgcatcgcaaggaaaagacccgcctgagcgcgctcgtccacttccatttccagtacatctttgccgtcaagcgtgatgctgccttttgtaacttcgtatttcgggtgtcccataatcgctgctgaaagcgtggatttaccggtaccgttcggccccatgacagcgtggaattcgccgccttttatttcaaggtttacaccttttaagatctcttttccttcgatttcaacgtgaagatccttgatcgttaatgttgaagcagccatatctatacctccaaaatatataatcattattctcaatttattctcattctaattttataacaaatgaaaagtaaatacaactttttatattacccggaacattcctaaagtttatcaaagatccaggcgtaattaaagctgtttgaaacagaaaaagggcggaattccgcccttttttactgaccgattttctcattaagctgcgctgcgaggaacttgcttttttggtattcaagctccctctgccgttcgacttccatcctttttgaaagacgccgtccatattcctcgtagccgatgccgtgtgacttctgcatcgctttttccatttcaggcgtatagtcaaggtccagtctttcatggctggtgcagataatgaatcaatcccttcatttgtttgtttccattgtaacaatgatccgctgctccggccaaagagagtgtgcccctgaatcctttcgaatgtgccggaaaccggcgctgtttttatgtgaaaagcggtattcacacgattgctctttctaatgcgtcgtatgtccgaattcctgaatgcactgctgcacgagggtcactccctgactgagtgctgcgcctcctccgaatgccgccgcgacgctgatgacctcaaggatgttttcctctgtcgcgccctggtcaaggcagcccttcgtatgataaatcatgcaaaattcatcttgagcattgatgctgatgccgagagcgattaattgtttctctttttcagtcaatgaatccgctgagaaacactgttcagtaaattcattaaacttccgtcccatcatcggcattttctgctcgaatatgcctaaaccttctttgtattgttttaatgcgtcatgcaggcttttgccgttatcctgatattgagccactgccattccctccaattgttaaccttcccttttattatggacagttctccgattaatacccgaaaaaaaccccggacgattcatccggggttttcgctttattcagatacaggaagtacggctccgtcgtattttttctcaataaagtctttgattttcttagagtgaagcacttccataagcgctttgattttcgctgatttttcgtcacctttacgaacggcaatgatgttggcgtacgggttgtttttcgttgattccacttcaatcgcatcttttaacgggttcagtttgttttgaatcgcatagttgacgttaatgaagactgcgtcgccttcttcttcattatatgctttcgccgttaattcaggggcgatttttttgaatatcaggtttttcgggtttttcgtaatgtttttcgtagtggcgtcaatcgttttcaccttcggatcaagtgtgatcagtccggctttttgaagcatcgccagcatacggccttgttctgcgacgttgtttgtcatgatgatggtcgcgcctttaggcaggtctttcaatgatttgtattttttcgtgtaaattccgaagggctcaaggtgaacggctccggcatttacgagtttgtagtctttattttctttcatttcctgttcaaggtaaggaacgtgctggaagtagttcgcatccacttctttgtcagctaacgctttgttgtacattttgtaatcgttcagcacttttactgttaatgtgtagcctttttccttcagaagcggctccgcttcttttaaaatttcagcatgcggtgtttttgtcgcagcgacgacgatttcctttttatttgagccgtttgatccgcaggcagccaaaactcccgcgaacacaagcagcagcgcacttagtacaatctttttcaatgtaaatcctcccttatcttttgtctattatatttgtaatcacatcaccgataatttgaatgataaagacgatgatgagaataaatacagttgccacaaacgttacatctgtattattggactggtatccttctacatatgcaaggtttccgagtccgcctgacccgatggcgccggcaatggcggtagatccgatcagagcgatggccgtaacggtgaggcctgagattaacgcaggcattgattcaggaatcagcactttgaagataatcgtcgatgtctttgctcccattgatctggcagcttcgatgactcctttattaacttcacggagcgcgatttcaacaaggcgggcataaaacggcgcagagccgataatcagcgcgggcaatgcagcgttcggccctaaaatcgatccgaccaaaaacttagtaaagccgagaagcagaataattaaaataagaaacggaatagacctgaaaatattgacaaccgccgcaatcacggtgttaatgattttattttcccataagcttcccttgcccgttaaaaagagcagaagaccgagaatcgctccgatgacaaatgaaaaggctaaagcaatgaccgtcatataaagggtctcgtatgtggccgtccacagctcggttatatcaacgttcgggaaccatttttcaaacatttgtgatcacctctgcttctacctgtttgtctttgatgaaccggatcacgttttctacttctttttcctgaccgtcaatgtggatgaataaagaaccgtaggctccgtctttcgtctgtgaaattttcccctgcagaatattgacgtccacgtcaaagtttcggatcatctccgtaatgaggggctgttcggcagcctgcccgacaaatgaaagctgaatcgtttttcctgtcgcggtttcctgcagaaaatgctgaatggtttctttcgtctcctccggttctgtcacctgctgaacgaaacgctttgtcatcggctcacgcgggtttctgaagacttggagcacttcgccttcttcaacgactttcccgttttccatgacggcgactctgttgcagatttttctgatgacgtgcatttcatgggtaatgagcacaatcgtcaggccgagtttgtcatttatatcggataaaagatctaaaattgaatcggtcgtctgcgggtctagcgctgatgtcgcttcatcacatagaaggactttcggattattggcgagcgcccgggcgatgccgacacgctgcttttgaccgccgctcagctgcgacggataagatttttctttaccctctaaaccgaccagtttaatcaattcatcggcgcggcggacccgttcgctttttttcacgccggcgatttccagtggaaacataatgttctcccggacggtgcgcgaccaaagaaggttaaaatgctggaagatcatgctgatttcctgacgcgcttttctcagtccgcggctgcttactttatttaattccgtccccgcgacttccacggtgcccgacgtcggcttttcaaggccgttcaggagacggattaaggaacttttaccagctccgctatatcctataattccaaatatttcgccctttttgatatcaagagtgacatcttggacagcattgacatccccatgcttcgctttgtaaatttttgaaacattttgaagatggatcaaagcaatcacctgccttacactattctaagaaatcttccgggtttctctgcaaaagaaaagcctttctgcaaaaatgagcagaaaggcttattgaaaaaggcctttctctcatcttccaaagcagatcgctttgagtgaattggcaccatttcaacattgttgatggttgccgggcttcatagggcacttccctccacctctcttgataagagaaaacatattgtattttcgtccggaaattcttactgtagaatagcacggcgaatgataaaaagtcaataaaataaataatgggagctattgtcacatagtagaatggcagttacggccgcttgctgaccgcctgaaaaaatccatttgtcagccagaggatggcctccagcttcagcagggcccggaatgatcccttcactttgagttttccgctttggatgagtttctgcaaagagacatcaccgtgcaaaagatggataatttccgtctggtttccgtaaaaggtcaaattagatttttcctttgaagccgccgtttttctcatttctccctgtccgttaattgagaccgttaaggcttctgtttctccttggaatgtaatcagcagcgttgaggcatttaatagcggtttcaaaaacagatgctgtccgtcattctctaaaacttctattttctccactcgtataacctcccgttttaatggccatacatacacatttctctttttaacggacagaaccctttataaaccgcacgacattttcctgtaaaaattgtcacatcgggaacgtttgcgatgttttttgtttaatcagctcatataaataggaaacggagcggaaggcgtatcctttctcaacaagctctccgcctttaaacagcaaaaagcacggaacgctctcaatctgataggctttggcgaatgcgggggaataattcacgttgtttttatagaaggcggcttcgggcagcatttcttcgacgacggaaagcattttggacgccagctggcatgtgccgcaaaacggggtgtacaaatacaggagataaacgtcatcctgaatcgattcgagttcattttcttggagttctttcattttgattaccacctcaggtcgttctttttcaaaaatacagggtctgcatcaaggccggctctgatcagtacagatgcaagatgatggcccgggcacgattcgacttgcctgtatgttctgtctatgcagatatggcgcgcttcgggcagctcccgtttcagctgttttcttaatttttctccggagtcgtctgcgtccgttaaaatatacacgtctctgtcaaacaggcggtccgccaaatcttccagttcagtttggccgatcgttccgtttgtacagatgatttccgcgggttcgatgagcacttccctgactttgattttatctgattttccttctacgattatgaccttttcatctccgttgaacataagcgcatcacctgccgattgttttaggctcaattgaaaaagaaggcagtgaaattcaccgccaacagttaacaccagccgttctcataatcgcaatccacatatttcggatcgttgccgtttatgacatcggctgttttataaaatttttgattttcaaatagaaagccctgtttgagctcgtactggttcatgcctgtcatctcgccgatggcttcattttcatgaaacaaggaaaaccggccgttttgaaagcggcccgtgatgttctccgtgacatcgaccttttgtttatcaaaagccatattggacacctcccgttacagatagaatgtccaaatggcccttttgctatccgatcagtcttcctgtgtcatttcgtcatattgctcggaagtcatgaggttttcgatttcttcagcatcagccggttccacgacgatcatccacgctttttcatacggagactcgtttacgaattcaggactgtcatcaaggtcttcgttcacttccgttacggttccgttaatcggtgcgtacagttcggatacggttttgacagattctacgctgccgaatggctcgtccgctttaatttcagcgccgacttcaggaagctcgacaaatacgatgtcgccaagttcggattgcgcgaagtgtgtaatcccgatacgggcttttccgtcctcaacttttacccattcgtgctctttggaataacgcatatctttcggtgtgctcatctaaatccctccatttttttcttataataagaagataccataattctttgaacctggcattacatccaatatttttcgaattggtcttctttaaagccgacagtgactttttcgccgtctgtcgtaatcgggcgcttcaggagcataccgtctgatgccaggagttcaagctgttcatcctctgacatgtggtacagtttttcctttaagttcagctcgcggtatttcatgccgctcgtgttgaaaaactttctgagctcaaggccgctcttttcgtagaggtctttgatttcttctttcgtcggtgtttcttccacaatatgtatttcgtttatttccttaccgcggtcttccagccattttttcgcattacggcacgttccgcatttagggtaccagtaaaaatttaacgacatcttcttcacccctcgtaaatgatcgtcgttattttaacacaatcactggtaaaaacctataacgttgcttcatgaaaaagcgctccggatgaaggagcgcttacagcatgtgatcaaaccgtatatttttcttcacggaagacagcggcagccgcttcacgttttttctgaatgagatttttcggtgtcaaacgcgtcagtttgcgcagcacagaaagcatcatgcggagggaatctccttcctccatggcgatgagtgattctttggcgtgcgcttcaatgttctgaagggcttcctgggcaaagatttccgtatataacagcttctgcgcagctttttcggcaccgtccgccgcaatcgctttttccgttctgaggacggcagattccaaagcgtacagcgcgctgacgatatcggcaatgttcaccatgatttcctgctcgccttcgatctcttttccgtatttctgcgccgcaagtcccgctgtcagcagggcgatctttttcgcctgtctgacaatgtatttctcctgttcaagaggctctgagcccggctcttcaggcatcagcatcatgagctcttcctggagcgctttcgctttttcaaagagcggaagctgcccttttacggcttttttcaggaacgtgctcgttacgatcaggcggttgatttcatttgtgccctcgaaaattctgttgattctggagtcacgataagcgcgctccacttcatattcctgcataaacccgtaaccgccgtgaatttgaacgccttcgtcggcaatgtagtcaagtgtttcagacccgcacattttgttgagcgagcattcaatcgcgtactcggcgattgactttgcgacttcgcgtccgtctttttgcgcttcttccgtcagtctgctcatattatcttcgaacagacccactgttctgtatacagagctctccatcgcgtacagccttgctgacatcgtcgcaagcttttcctgagtgagcgtgaagcttgagatcggcgttttaaattgtcggcgctggtttgcgtaagcggcagacagctcaatcacccgtttagaagcgccgattgtgccgacggcaagcttgtaacgcccgatattcaggatattaaaggcgatgacatggccttttccgatttcgccgagaaggttttctttcggcacttccgcctgatctaaaatcagcgttcttgtcgatgaacccttaatccccatttttttctcttctgggcccgttgacacgccaggataatttttttctacgataaatgcggaaaacttatctccgtccactttagcatagacgacaaagacatctgcaaaggcggagtttgtaatccattgcttttctccattgagaatatagtgtgtgcccgcttcattcaaaacggccattgttttcgcgccgagggcatctgaacctgaacccggctcagttaaggcgtaggccgcgattctttgtcctgaagccaagtccggcaaatatgttttcttctgctcttccgtgccgaagaacacgatcggcaatgaaccgataccgacgtgagcgccgtaagaaagcgaaaagctgccggcacgtgaaaacttttccgtaatgaaggctgaactgattttatccagaccgatgccgccgtactcttcaggcacatccgctccgaggagaccaagatctccggcttttctcagcagtctgactgagtgctcaaactgatggttttcaatttcatcaatataaggaagaacatcgtttacgacatagtcttctgtcgttttgccgatcattttatgttcgtctgtaaaatcctccggtgtgaatacttgatcatatcccgtttcttcaatcagaaagctgccgccttttttgacgttgaccgtttcctgtttcatgttcgtttccccctttttttaaatgagctcaaatacgccggcagcgcccatgccgcctccgatgcacatcgtcaccacgccgaattgctcgtttctccgtttcatttcatgtatgagtgaaagggtcagcttcgccccagtgcatccgagcggatgtccgagcgcgatggcgcctccgtttacgttcaccttttcttcatctattccgagcgatctgataacttgaatggcctgtgaagcaaaggcctcattcaattcaaaaagcccgatatcctgtaattcgagtccggcaagcttgagcgcccgcggaatggcttcaatcggtccgatccccattacctctggcggaacgccgcctacggcaaaggaacggaatttgacaagcggcgccaatccgagcgacgaagctttttcgcgatccatcagcatgacagccgccgcgccgtcacttgtttgtgaagagttcccggccgtcacggttcccgttttagaaaacgccggacggagcttcgctaaaacgtcagccgatgtgcccggacgcacgccttcatcttgagaaaagataaattgttttttccgaggcttatggtcatcaccgatttctgtcagcgacacttcaaccggtacgatttcgtcattgaatttcccttctttaagggcttttgcggcattctgatggctccggacggcaaatgcatcctggtcttctctggatacgccgtacgtttcggcgacctgttccgctgtgtgtcccatgctcatgtaatactcaggcgcatgctccgccaaagcgatattcgggcgggtcacatgccccatcatcggtacttgcgacatggattcggcaccgcccgcaattacggtgtcaccagcgccgagcatgattttttcagctccgtaagcgatggattggagtccggaagagcagtagcggttcaccgtaatagccggcaccgtatgaggaagccccgccagcgcaccgatattacgtgccatatttaatccttgttcggcttcaggtgttgcacatccgataattaagtcatcgatatttccttcatagccgcctgcccgtttcagcgtttctttcacacaaagcgcgcctaaatcatcaggacgaacggctgcaagcgacccttttttcgctttaccgaccggagttctcgcaccggccacaatgactgcttctctcataaacaccctcctagttccgtaaaggtttgcctttgaccagcatatgctgcattcttgcttgagacttcgcctcgccagcgaggcttaaaaaggcttctctttcaatctcgagtaaatattcttctgaaacctccgtgccgaacggaactcttcctccggcaatgacatgagccagcttcttcgcaatcttcatatcgtgatctgataaataacccgaccgtctcatttgatctgctccgagcagtaacgccgcacagccggtttccccggtgactctcacttttttgcgggctggcgggcggtatccgctgtcatataaggaagcggccagctgtttcgcatcgtgcagcaggtgatcctgattcatgctgacacggtcagccgcggacaaaatctgcatatcacgcgcttcgtgcgccgaaccggacaccttggcaagcgcaatggtttcaaaggttttaatggccgcgtccatcagttcgcttccgctgttcaagtaattcatgtacagctctttatttcctccgccgcccggaataagaccgacgccggtttcaacaagacccatatacgattcgctcgccgcctgaacgcgtgccgccgggagacagacttccgttcccccgccgagtgtcatcccaaacggcgccgccacaacaggtttggcgctgtatttgatgttcagcatcgtctgctgaaaacggcggatgacaaaatcgacttccatgaagttatcatcctgagcttccattaaaatcatcgcaaggtttgcccccgcgcagaaatgtctgccttggtttccgatgacaagtcctttataattccgctctgtttcctcaagcgcattgtcaatcatctgaataatgtctaagccgatcgcattgcttttcgtatgaaattccagaagcgcgacatcatcgccgagatcaatcaaacttgctccgctgtttttgctgatcacgccctttgtttcttttaacgtttgcaggctgacgcgtttcggattttcttttactgccctgtattggccgtctgaatagtaaaattgtgttccgttttccttcatataaaatgtttcatgaccctgatcaagcatttctttcacccagccgggcagttttgcgccttcttgttcaagccgctccgctgattttctgacaccgatggcatcccacacctcaaacgggccgagctcccaaccaaagccccatttcatggcgtcgtcaatcgcttttatatcatcagcgatctcaccaagaagctgagctgagtataagagggtttgcgacgtaatattccaaagcagtcgtccggcgcggtcatcagcataaataagcgctttcattttgcctttggcaccctttgcctgtttggcggcttctaaagcgggtgttttcattttcgtgcgctcgccgtatgtcatggttagcggatcgagctcatatattgttttaccttcttttttgtaaaaaccttgacctgatttgctgccaagccaattgtttttcagcatgtcattcataaattccggcagcttaaacatgtctttttcagcgccgtcggctttatcataaacattttttgccacatgagcgaatgtatcaagccccacaacgtcaagggttctgaaggtcgcgcttttcggtctgccgattaaaggcccggtcaccgtatccacctcgccgatgccgcagccggaagaaagcatttctcttaccgtgactaacaagccgtacgtaccgatgcggttggcgataaagttaggcgtgtctttggcgataacgacacctttcccgagcgtgttttctgcaaatgaagtcataaacttcagcacgtcaggatctgtttcctgaatcggaatgatttccagaagctttaagtaacgggccggattaaagaaatgggttcctaagaaatgagctttaaaatcggcagatctgccttccgccatctttgttacggaaataccggacgtattgctggacacgatgcttccaggtttccggtattcatcaacaagtgagaaaatctgttttttcacgtcaagattttctacaacgacttcaataatccaatcggcatccttcaattgagcagcgtcatcttccaaattccccgccgttatatagtcgagattggaagctgaagtcagcggcgccggtttttgcttcagcagttttttcatggccgatcggctcagtctgctgcggacctccgggctttctaatgtcagcccttttttcacctcatcctttgtcagctcgtttggcacaatatcaagcagcaggacgggaattccgatgttagccaagtgcgcggcaattccggaccccatgacgcctgatccgagaacggctgccttctttataaacttgtgcatgagtcatcccccttgaactttgaatgaatagtcattcattttttcggcaaaaaaaatgaaacccttttcttctttcatcttaaaagattttccggatgacttcaatagcaaatatggaatttttttaaatttttcgccttccgcatgttctctgccggggacgggaaacttaaacgcggaggtgaagggaatggtgagagggagaaaagatccgtcttctggcgcagtgagcgcggccagcatgaaaggaaatgcgggaccgaagcaaaaatacggcggcggcaaacggacgagccaaaatcagcaatataaaaaagaaaacatggaataacatactgcggctgctttttaagcagccgttattttttgaagattcctttcagcacgaacgccgcatttgccgggcgctcggcaattcttctcatcaggtagccgtaccaatcggttccgtacgggacgtacaccctcatcctgtatccttcttcggcaagctccttctgccgctccgttctgataccgtacagcatttggaattcgaactgcccgcggggaatttgatggtcgctgacgagtgttttcgtataagaaatgatgtcatcatcatgtgtcgccaccgctgtttcatggccgctcaaaagctgcagcttaatcagctgctggaaatgaaggtcggtcccttttttatcgggaaacgccacggctgccgattctttataagcgccttttacaagcctgagccgcggcttgtatggcatcaggctgctgatatcttcagcggcgcggtacaaataagcctgaatgacggttcctagcatcggaaaatccggcttgcaccgcttatataaatcaagcgtacggccgcatctggaatagtcctccatgtcaatcgttacgggaacgcggcgttctttcgcttccgtcaatatgtctctgacatgctgttccgcgagtttctcggaaatatccagaccgatggatgttaatttaagagacagctcacagtccaattgatgatcggcgatcgccctgattgcttttttacattcttcggccgtccttcttgcatctttctctgaacctgcatattcaccaaggtaatcaatcgaagccgataacccgttttggttcagccgctttaccgttttcacggcttctgtgagtgtttcccccgcaacaaatcttcccgcgccgaagcggaggccgtaagcctgggcgaatttcgtaagcattttatttttcgacaaaaataaacatatgctccgcagcatggatgaactccctcctttttctttttttcgtgcatgaaatcccgatcgcagagaaagctaaaaagaacagaattgaaggaggcgtttaaatgaacaaccaagagcagcacggaaacttgccgcctgccgtcatctcaacgaaagaccatttgtaccttgaggacatgctgaactggaatctgcttgccatgaaaaaagctcattttatggcggaacaatgccagaatcagacgttaaaacaagagcttgaacaaatcggccggatgcatcagaagcattatcaaaacatattgggccacttgaatcctgctcaaggcggacagacaacaacaggctatatgcaataggaggacaatacatggaacagcaaaatcaaaaaatcactaacccgcaaacgcccgtgcccaatacggcgcaaatgaatgacagagacttggtgaatgagctgctgacgacggaaaagtatataacaacttcatattgcacagccctgcatgagctcagccatgagtctctttatcaagatattcaggccattttcgatgagtcacaaaaagcgcaaagaagattatacgatgtgatgtttcagaatggctggtattccattgaagcagccgatacccaaaagcttcagcaatcgtatcagaagttccagcagacgattcagcagcagtcaccctaccagcagtaacatgaagaaaaaggatttgatgttttcgccaaacatcaatcctttttttatttttgcacaaaaggattgacttaccattaatccttatttatatttaactaatgttaattatttttcaaagtaaccagatgaggaggaattatgaaaaacgcggatcaatatgtgtctgatatccaaaaatctcttcagacgctgctgcaaaacatacagccggaaatgatggaaagcatggcgatgcatgaggtgacgcctgcccaattatttgttttagccagcctgaaaaagcacgggagctgcaaagtttccgaaatcgcggaacgcatggaagtaaaaccgagcgcagtgacgctgatggccgaccgcctcgagcaaaaaggactcatcgtccgcaaacataatcagcaggacagacgtgtcatcgacatcagccttaccaaaaaaggcgaaaaaaaattcgaagatgtcgtggaaggaagaaaagcgatattagcgcgaaacctatccgttctgactgatgaggaactgcttcagtccatgaacattatccgcaaagtagcggaagccgctgagcaatacgcggcggataaaaaagaaaatgaatagaaaagaggagctgccaaaacatgagtattgaacaaaaagatccaaaacgcgcattattaataaccggtttaattatcgccatgtttttctcggcccttgacggcaccatcgtaggaacggcgattcctaaaatcgtgggtgacctcgggggattaagcatgatgacgtggctgaccacggcatatcttttaacttcgacgactatcgttccgattgcggggaaacttgcagatttattggggcgccgcgtcgtatatgtgtcaggtttattgatttttatgggagcttccgcactgtgcggaatggccagcaacatgacggaactgattattttccgcggccttcagggaatcggcggcggtgtcatgatgccgatggccatgatcgtcatcggggatttgttcacagggaaacagcgtgccaagttccaagggcttttcggggcgatttacggtcttgcttccgttatcggcccgcaaatcgggggctggattgttgactctttaaattggaaatgggttttctatatcaacctgcctgtcggaatcttagctgtgatctttatcgcaagaggacttcagggcagaaaacagactgggccgattaactttgacatcgccggcatcttcacaatgatcgtcggaatcgtcagcctccttctcgcgctcagcttcggaggaaaggattacgcatggggatcatggcagattatcggtctctttgtacttgcgcttgtcggaattgtcggattcgtgttcgctgaaatcaaagcaaaagagccgattcttccgatgtatctgtttaaaaacagaacgtttaccgtactgaatctgatcggctttttcatgagtatcggcatgttcggcgccgtcacgtttgttcctttctttatgcagggaattatcggcgtcagcgccaccgcgtccggaacgattatgacgccgatgatggtatctatgatcatcacaagtattatcggaggccagctggtttacaaaatcgggattaaaccgcaaatcatgatcggtatgctgatcatggccgtcggcttcttcttattgacaactttgcagctggataccagcaaactagcggctacgtgctatatggccgtgatcggtctgggaatgggactcgtcatgccgcttctcacgctcgctctgcaagaaacgttttcaaaagaagagcttggcgtcgtgacttcttcaagccaatttttccggatgatcgggggaacgttcggcattacggtgctaggcgctgtcatgaatgccagatccggaagccttttatccgacagactggtgccttacttagactcactcccgaaacaggcaagtgcctttgccgagcagtttaaaggtatgattgacaagaatcctgaaggactgcttcaatccctgttcagtcaggaatcgattaagcagattccggccgcgttttcttcccatatcgtgccggttttgaaaacgtcactgatggattcgcttcacagcgtgtttttcacagggctggcctttatcgcagccggattggtcctgacactgtttgtcaaatcaattaagctgacaaacaaaaaaacaggcaaagaagaagaaaaagcgaaagccgtttaatagagaaaaagcccgcgaatgccgcgggctttttttatatcatctgggccatcccgtttccgaaagaccagtcttccgccgcattgcccgagaggacgataaactcggtgtattgacttgtgaagatattctagcagaaaaatcaacgttttgaatgcaacatatttttaactatttcagttgcaacgttgttaaattaatctgtattttagtgaaagtaaatgtaactttttcttaataagttacttttgagaagatctatttctccccatcgctacttaggaaatatatgttttaatagaagaatgaaataatagaaataaaggagattgaaaatgatcaaataaaccgcaattttttcataatgggaacagcgatttttataacaaaaaagactccaaaaatcgaagcctctttaccaaaaactatttgttttcaactttatctttccatttcttaattgagcgttttgacataccgtcagaacctttgggaattaaagggacattagaattataagcctcagcattaaatccaataaaaataaatggttgtccttcagtaagttcaaaataaggttctaattcctcgaaattggtaacacgatctgtaagataataggccaattgtttaataggcataaggataatagccaaatcaatttcgccatgttttaatcctaatagaagtttgttcattgaacggtgggcagaactaatatttcctgtttcaaattccatacctacacgtttaagttcactgttttctatgaactctttataaacatcaatcggaccaccttttttcttttcaagtttaagtatatcaaggggtttttctctataccagttatatgtatcttcaagtaaggtgtaacatagttctttaattggtactacaccgttacaattcttttcggtgttgttaatcgtgaaggtttttgaggttgctggccaaataggtgaacaaatagatgttttaacttcattgtatgcttgttgaattaacttatctttagatagtaattcttttgcttcatcagtaataaactctttttctacttccattctaatttgcccccacttatttcttttgttcacagttgccgattgtagtaaaatcaagtaagtcctttggttgaacaccgagtgctttagaaatcttttcaatattgtctaaggaaacatttcttgttcctcgttcaatatcagaaatgtaggttctgtgtaggtcacattcaaaagctagtttttcttgtgacatattacttttggacaatctaatttgacgaactttttgaccaaataataatctgatattgttagtcatagtacctcctgataacaattgacgcttgtttaaatggaatgataaaatcaagtagactataggtctacagactataagttacacgaggtgtataatattgcgttttttttctgtttttgacattgttaaaaataaagcgaatcagttagggtatacggaaactgaaatgtatgctgtattgaaaaattacaatgtgaataagaaggatttactcgcctataaagaaaatggagttattccaacagataaagtgttgaatggaatacttagttatcttggaatgactaaagtagaattagaattaaaattaggcaggataccggctgggttagaggatgtgttcttaaataacacaaaagaaattgccaagatcctcgaaaataaaaatagtgttaaactaaacgaatttaattctattcaagaaatcaaaccttatttttatactgatcttggaaaattatacaatggggattgtttagaactgtttaaacaagttcctgatgaaaacgtggacactatttttgctgatccaccatttaaccttgataaagagtatgatgagggtgtaacagataaaaattcctttagcggatatttggattggtattataaatggatagacgagtgtatcagagttttaaaaccaggcggttctttattcatttataatattccaaaatggaacacttacctttctgagtacttaaataggaaattgaattttagaaactggataactgtagatatgaaatttggacttccaattcagaatagattatatccagcaaattacagccttttatactatgtaaaaggtgataaacctaagacatttaatgttcaaaggatacctctacaaacttgccctcattgtggtagagaaataaaagactatggcggttacaagaataaaatgaacccaaagggtgtaactctttctgatgtttggtcagatatttaccctgttagacatagtagttcaaaaaatagaaagttcaatgaattatcagttaaattacttgatcgtataataactatgagtacaaatgaaggtgacgttgttttagacccgtttggaggaagcggtacaacatttgctgtaagtgaaatgttaggtcgtaaatggattggttttgagttggggaattgtgaaattatcaaagagagacttaaaaataaagacaaagataaaaagctgttaggtaaagtttatgaagaaaaaaacaagctgttccctaatagggttaaagaattacgtaaaaaaaatggtttatggattgatgatgattttagacaagaccatgagggaaattctaaaggtgataaaaaaaacgaaaacaatgaccaaatttcattaagtctagaatgataattatcttttaaaaaaagtcgatatttaaatactcactgaaaaaaaaatatacttttgataaggactttagagagatttttactgcattaaagaattggaaaaaccagataaaaaatggtgaatggacttcctaatagaagtccattttatattgtaagttagtctatatggatcgatcctcatggaaaaagatgatctattcgtaaaaattcttctcttatttttgaatcttcaaacactacataaatgtcattggaaattaatcttatattgaccttgcatttccttgccgatctccactatctcagtatgcattaaatcggtatcttccggaattaaggaagcttcatattcattaaggttttttcttctgttagggcttgctgaaacagtggagcgtactctaattttagttctgttttagtccgcccagctcttctaacatggaattaacaatctaaacttaagagtcaatttccttagcctaggcttttaaataaatccgttctgaaagatcagccccttcttggtctaaagggttagcggtcatagcttccggcacctctctttgatgccgaaagctttttattgtttttttctgtgatcttcattgagctgtttaatgtgctgtatcgcagctttgatgccctctttggcgtccgggtaggattcattccaatgttttacgaggggaggcatgctttttgcgatatgtgtatacaaaatccactgcctgacttcttcctttagatccggatttgtttctccaagcaatagttctgtgtatttttcaagcaggccgtccagctgctgctgtagcttctcttccataccgttcccttcccttttccatgattatgacaatcgggcggtgagggccgcttcctgcacgatacatctgccgcgtccgtgcggaatgcaaagcggcgtgccgaacagcgggtcctgtgttacctggcagttcatcgcaaatacattctgcacaagctcacaagtaatgacttcttcgggacgcccctctgcgtaaatctgtttatccttaatggctaccagataatgagcataacggcatgccagattgaggtcgtgcagcaccatgacgatcgtccgtttttctttttcatttaattcaaacagcaaatcaagtatttcaatttgatgcgtcatgtcgagataggttgtcggctcgtcaagcagaatgatatccgtatcctgagcgagtgtcatcgcaatccatgcgcgctgccgctgtccgcctgacaaggaatccaccgggcggtcggccatttcctcaagcttcgtcgctttaagcgcttttgccacggcgtcttcgtcctctttggaccattgcttcagccagctttgataagggtatcttccctgcttcacaagctgatgaaccgtcaggccttcgggagctgacggactctgcggcaagatagccagttctcttgcgacttccttcgttggaagcttagcgatggcttttccttctagaagcacagaaccgcccctcggtttcatcagccgcgccaatgaacgtaaaagcgtcgattttccgcagccgttgcttccgatcaatacagttatttcgccttttggaatcgcaacatccaattcgtcaatgataacagtctctccgtaccctaagctcagcgtctctgtagaaattgcactcataccgctaaccgctccttttttgtgtttcccaacactatgtatataaacaaactgcttacacattcaacgtgagataatgattatattgtaacagaaattaatgactctgaatatcattatcaattagttttgggcaaaaaagctacggacggaggttatttttttatttccgtcatttctccgtcgctttttttcagtttcaaataaaaatggtcataatggctgtctaaattaaaagccgagagcacctgccggacgacttcaccttcctgcatccggctgttaacggcaagttctccgaggatcatcttcatttcatcgagcgcttcctcgccctctctgtgaactcctgagagcttatcctggatgtctgccttttcatgaccgccttttctttcatacaaaccctcatagcggttatgctctccggctccgtagttgacgcgcagggaaaagctgctgtaaggaaccggcttcgcggatgacacgggtgtgctgtcttgttccgcttcccgtttttcttcattcaatcggcagccggcaatcagcatcagcgtaagacataaaacgcccgccgtcctgatccatttcatgcgattcactcccattcaattccgatcgtttttaggtatttccaagggaggccgctgtcattcatggaacaaaaagaaccggagcggtaacagctccgggcggttcaactatctatcatcattcagtcagctctaaaaactcctgcacatcccggaccgcaaggcgtatcgcatcttcccaaaacgcccgttccgtcagatccgctccaaggtgcttcatcgccaaatcctcaacggtcatcgaagccgtgtcacataaaagcgcgatatatttttcttcaaagtccgttttctcccgtaaagctcttgcgtatattccaagggaaaataaataaccgaacgtatacggaaagttgtagaacggcactcccgtaatatgaaaatgaagctttgacgcccagaaatgagggtgatattcccctaatgaatcgcaaaatgcttctttctgcgccgcttccatcagttcattcagtttctcagccggaacgacgccctgtttccgctcttcataaaaccgcgtttcaaataaaaatctcgcatggatgtccattaacatatctatgcttttttgaattttatcttcaagcaagaacagcttttcatcctttgtctccgcttgtttcaaagcggcgtcggcaacgatcatttccgcaaaagtcgaagctgtttcagcgacattcatggcgtaggctctgttcagctgccgcacttggagcatggcctcctggtgaaacgcgtgcccgagctcatgcgcgagcgtcgatacgtttgaagcgcttcctgaaaacgtcatgaaaatccgggattctccgctgtcgggaaagctggtgcagaaaccgccgacccgtttgccgctccggtcttccgcttcaatccaccgatcgcggaacgctttttccgtaaatgcggacagctttttgccaaacgtcgaaaattggctgacgatcagattggccgcttcatcatatgtgtattctttcggtgcctcactgatcggcgcattcacatcataccaattcagccgctcaagccctaaaagagacgcctttcgattcagatattcggcaaaaggctttttatgatcagtaatcacctgccacatgacatctagcgtttcttttttcatccggttgatcgcaagcggctctttcaaggcgctttcccagccccgcgctttatagatttccgttcgaaagccggccagatgattgagcgtactgccgaacagctcctcttctcccttccacgcttcgctaagctccttaaacacttgccgcctgatgccgcggtccgggtgcgccatcatattttccgcttggccgaccgacagctctttatcctcgaacggaatcttcattctgccgaccgccgcattgtacaggtcgccccatgcgtgatagccgtcaaccgccagaccttcaatcagtctttcttctgaagcgctgagcttctcccgtatccggtctcttctttcatttaaaacgtatgtgagttcctgaagttccggtttttgcagcagctcctcccaaacccgctcgtcaatccgggcaagtgtatcatcaagcgtgacaagagcggatttaaaatcactgctcagctgattgatccgcgccctccactcattcgctttctgatcatcagtgttctgagcctgaagacagctgacgaaagctcccgcctgcctgatcatgatcgctgaccgttcaaacctatcaatcagattgaccagctccccaccttcatcagcatgcgacggaactgtaaacgcctctgccgctttttgaaaagcgctgagctgctttttaagctcctgtatgtattgctgaaaatcttccgacctgctcccgcccgcaaaaatggagtttaaatcccacgtttccttcaatccctctaatgccatctttttcattacccctttctaacgaagctgattccattataaaacaattctgacatatttccgaacgatttctccttctatccgcaagatgttgtacactaaagatagcacaaacgagggggatgatgagatgaacagaaaaattgccgttgtaaccggcgcgacgagcggattcgggctgctgacagcgctgaagcttgcccggtcttatcacgtcattgcaacagccagacagccggagaaagctgatgcactgaaagaagccgccgctcaagcgggtgcatccgcccatattacgatcgttgctttagatgtgacggatgagcaatcagtgtctgacttcggtaaaaccgtcagcggtttcgggccggttgacctgctcgtgaacaacgccggcactgcgtacgggggatttattgaagatgtgccgatggaacattacagacagcagtttgaaacgaatgtattcggcctgattcatgtcacaaaaaccgtcctcccttctatcagaaaaaacggcggggcgaaaatcatcaatatcagcagcatcagcggactgaccggctttccggcgctttctccgtacgcctcttccaaattcgcgattgaagggtttacagagtgtctgcggcttgagctcctgcctttagggattgatgccgctttaatagaacccggatcctataaaacttcgatttgggagacgtctctctccaatcaaattacggcacccggtcaagactcgccctattaccgcttttttcagcccattgaagctaacgtcaaagcgaatgcatcaaaaagcggcgatcccgatgaggtggcagagctgatttatcaattggcacaaaaaaagcgcctgaagaaactgcggtatccgatcggcaggggcattaagctgacattggctttccgttcactcttcccgtggtctgcctgggaatctgttataaagaaaaagctgtttacttaaacctaaattataattattataatttagtattgatttttaattgatacgtgttataattaaattaacaaatcacagggaggacgatgaatatgaatacacaaaacgcgaaaaaaactgaaaatctggttgagaaatcaatgaacacacaattatcaaactggtttatcctttactctaaattgcaccgttttcattggtatgtaaaaggccctcatttctttacgctgcatgaaaagtttgaagaactgtataacgaagcggcagaaacggctgatgcgatcgccgaacggcttctggccatcggcggacagcctgcagcgactttacacagctaccttgaacaggcttccattacagatgaaggccaggaaaagacagcttctgaaatggtggaatcactgattcaagactacaaacaaatcagccgcgaatccaaatttgtcatcggcgtcgctgaggaacaaaatgacccgtcaactgccgacctgtttgtcggattggctgaagtagcggacaagcacgtgtggatgctgtcagcctacttgggagaatgacgaaaaaagctgaacctccaatgaaggttcagctttttttatgcgttcagcttgcgctttcagtttgtttcgttaatgtgatgttcagcgtctttttgctgccgcctctgagaacttgaacagtcgttttatcgccgattttcagctggttatataggatctgtctgatatcggcgctgctctcaatatctttgccgttcaattttacaatgacgtcatttgatttgatgcccgctttcgcagccggtgagcctgactgcacttcttttacataaacgcccttagacagctggtcgccgaacagtccgagcgtgttttcctgataggtttccggcacttgcgacatatcaatcatctgcacacctaaaaacgggcgctcgacttttccttttgcaagaagctggtcgacaatcggttctacatcgttgctcggaatcgcgaagccgagtgattccacgccgttttcactgactttcatgctgttgatgccgatgacctggccgctggaattgattaacggcccgccgctgtttccggggttaatcgccgcatccgtctgaatcacgttcatttccaccgtgccttgggatgtatcggcgtctaccgttctgttcagcccgctgatgacgccttgtgtgacggtgccggagaactgctggccgagcgggttgccgatggcaatcactttatcggcaatgcgaagctgcgaagaatccccgaagctggccgcttttttgacattggacgagctgatttccagtacggccaggtcactgatggcatcctttccgacaagctttgccgtttcggttttcccgttataaagagttaccgacagtttgtttgctccttctacgacatggttgttcgtgatgatgtacgcttttccgccgtcttttttgaagatgacgccggaccccgtgccgctctccgtttcagagcttgaactgccgtcaaatccgaactggctgctttgcgaagcctgatagttggacactccgacaatcgcaggctccaaatcttctaccatatccgctacgcttgaagtattttttaatggcgttgacgtgaaattcgatgactgaacttgtttcgtatcagaaacagcttctgtcttatgctgctcactcggcagattcggcacaatgccaagcacgaggccgccgccgatgataccgcccaaaaccgggctcagccaagcggctctccgttttttttcttttttcacagcagccgttttttcaaattccgtgccggcagccgtctctttttctgcttctttcgagacggggccttcgagcagctccgtctcctgatggctgatctgctgctgggcatttctgttttgctccgtatgtgaaagatctgactgatcgcggttcatgccgtcatctcgctgatcgttcatattcacgcacactcctttagcatgttttcattctattgattacatattcatcgcatgtacaagttctattgtcccaattataaggagaaaagcaaagctccaaaacaaaatgtgtttgaacatgttatcttccccgctttttttcttcctttcttcccttatacacatcataaacaaacattgtgggataaaaatgaaaagaatatgtgaaattatgaaaatgcggcttgagtatgttaaaactagtataatgacgttgaaaggatgtgaaatgccttgtcatacaccatttatctagttgaagatgaggataacctgaatgaactgctcacaaaatatttagagaatgaaggctggaacattacatctttcacaaaaggcgaagaggccagaaaacagatgcagccgtctccccacctgtggattcttgacatcatgcttccggatacggacggctatacattgataaaagaaataaaagaaaaagatcccgatgtgccggtcatttttatttccgcgcgggatgccgatattgacagagttctcgggttagagcttggaagcaatgattatatcgccaagccttttttgccgagagaactgattatacgggtgcagaaacttctggagcttgtgtataaagaacagcccgcccccaaaaaaagcgggatcaccgtttcctcctacaatgtgatcgaagaggccagagaggtttatgatgaaaacggcagccttgtcaatttgacgtctaaggaatttgatctgctgattttatttcttcatcacaagggacaccccttctccagggaagatattctgctgaaaatatggggccatgattatttcggcactgaccgggtggtcgatgatcttgtgcggaggctgcggaaaaaaatgcccgggttaaaggttgaaaccatttacggattcggctacaggatgatgacgtcatgaaaaataagccgcttgcttttcaaatatgggtggtcatctcaggcatccttttagccatctcgattctgcttctcgtgctgttctcaaatacgctccgtaattttttcacggatgaaacgtacacgaccattgaaaatgaacagcatgtgctgacggagtatcggctgcccgggtcgatcgagcggggatattacagcgaagatgcgaccgctccgacgactttccgatccgttcagcacgttcttttgccggaacgggaggagtcggccagcgacaaggacttgaactatttttcttcttcttttatccataaggtgtacaagctcgcgggccgccagcacagcgtcacgaaacgatacagcgcggacatcagcggtgaaaaagtgtttttcgtcattaaaaaaggcctcaccattaacggtcagaatgccatgatgctgtcatatgcgcttgattcttatcgtgatgatctggcatacaccctgttcaagcagctgctctttatcattgccggggtgattttgttaagctggattccggcgatttggcttgccaaatatctttcgcgcccgctcgtttccttagaaaagcatgtcaaacggatttcggaacaggattgggatgatccggtcatcgtcgacagaaaagacgaaatcggaaaattaggccacaccattgaagacatgcggagcaaactggtgcaaaaggatgaaacggaaagaacgctcctgcaaaatatctctcatgatttaaaaacgcctgtcatggtaataaggggctatactcaatcaataaaggacgggatttttcctaagggggatctggaaaacacaattgatgtaattgaaggcgaagcagaaaagcttgagaagaaaattaaggatctattatatttaacgaagcttgattacttaatgaagcagcgggtgcaccatgagacatttgacattgtgaaggtcacggaagaagtcattgaacggctcaaatgggcccggaaggaattagcgtggaccgttgacacagaagatgtaatgatgatgcccggtgatccggaacaatggagcaagctccttgaaaacattcttgaaaatcaaatccgctacgcagaaacggcgattcacattcggatcagccaaaatcagcagcagattgtcatgacggttaaaaatgacgggcctccgattgaggatgagatgctatccagcttgtacgagccttttaataaagggaagaaaggcgagttcggcataggactcagcatcgtaaaacggattttaaccctgcataaagcatcaatttcaattgaaaatgaccaatcgggtgtaatctaccggattatcgtaccaaagtagactgtagtttcattgcagtctttttttatgtgaaggagtagccgttaaaatctctgtagtttgttttcagcggtttttggcattgatgaacccatttcttttcacaaattgtctttttcggatatttcaccttttcgactttaattcctctgtttcgcaagcggctgatcatttcatctaattctttcattttcagattcaccctttcgccagaactttgaccattcggtcagctcactttataatataaataaaacaaaacaaaaaaacaagttacaatcaggttaaatttatggaatatcaatatgaccatttagtcatacatgagaagcacaagccagcctcctggctccgaaagggtggaaccattgaaggaaaaagaaaagctgattattgaagcagcgatcaaactgtttgcccggaaagggtacaaatcaacatcggttcaggaaattgccgatgaatgcaaaatctcaaaaggcgctttttacctttactttccttccaaagaagcactgcttttatctatgctgaattactactacgataaaacgtttacccgaatcacgacgatccaaacggagggcgacagcccgagagccgcttaccaaaaacagcttgcggttttttacgaatcgattctcgcgcatcaggattttattaccgtgcagatgaaagacggctcactgccttataccgaagaagtagcgcagtgcggaaagagaatccgccggtcgatcctgcagtttcatatcgacagtcttcttgctatttacggagaaaaagccgaaccatacacagccgaactttgctttttaatagaaggaatcagtcagatgtatcttgaatatctcattctgaccggccggtccgtacagcctgcgcttcttgcaaataccgtgattcacagaattgatgacatcgtaaacggaatggcggacagacatgatgaaccgtttatttctcttgatgaggcaagctcgctgtttgggccccttcataacgggcagcccgatcctttaagtcaatcgatctttgagaccctccgcgcgcgcatcagcacgatggacaagccgcaagcatctgaattcaccgagagcttggatattctggaagcggaaatgaagaaaaagtcgccgaaaccggcaatcatcaaaggaatgattttgaatttgaaggaatctgacctgctggctgaagatgcagaacagctcagatttttactgaaacagcagtttatttagaagaacggccgcagtgactgcagccgttctttctgtttatgctttcggatgcaccatatcttccggacgcaccatttcattaaattgttcttctgtcagaaggttcagctgtaatgccgcttctttcagcgtcaagccttctttgtgggcaagcttggcgatttttgcggcgttttcataaccgatgtgcgggttaagcgccgtaacaagcattaatgagttagagagattttcctgaatcgtctcttggttcggctcaataccgacagcacatttgtcatggaaggaattcattccgtcactgagaagctgcactgtctgcaggaagttataaataataaccggcttgaagacattcagctcgaagtttccttggctggccgcaaatccgattgtcgcgtcatttcccatcacttgcgcggcgatcattgtcagcgcctcactttgtgtcgggttgactttgccaggcatgatagagcttcccggctcattttcaggaatgacgatttcgccgattccgcagcgcgggccgcttgccagccatctgacatcgttggcaatcttcatcaggtcggcagccaatgcttttaacgcgccgtgaacgtgagtgatttcatcatggcttgtcagcgcatggaatttattaggcgagctcttgaatgtctgccccgttacttttgtgatttcttcagcgacgaattcaccgaactgcgggtgggcattgatgcccgtgccgactgccgtgccgccgatggcaagcgcgcgcattttttccgttgactcaagaatcatttctttagaacggtcaagcatgtatacccagccgctgatttcctgcccgagcgtcagcggagtcgcatcctgcaaatgcgtacgtccgattttcacaatatcctgatacgctttcgctttttcatcaagtgtcgtacggagctgatcaagcgccggaacaagctgttcatatacggcaagaaccgccgcaacgtgcatcgccgtcgggaatgtatcgtttgagctttggctgcggttgacgtcatcattcggatgaatcttcagctcggaattttgttctttcagtaaagcagtcgcgcggttggccaccacttcgttcatattcatgttgctttgtgtgccgcttcccgtctgccagacaacgagcggaaagttatcgtcatatttgccgtttaacacatcgtcacatacagcggcaatagcctgtgctttttcagactctaagttgccgaggcgttcgttagcgatcgccgtgcttctttttaaaattgcaaacgccttcacaacacgctgaggcattttttctgaaccgattttgaagttctctttgctgcgctgtgtctgagcgccccaaaatttatctgccggaactttaacttctcccatggtgtctttttcaattctgtagtccatttatgtatccctccataacagttgcttcaccctgagtattattcgccagtaacagatgaaaccctttttatttttcggccttggccgtttttaatttcagctcaagatagacgcgcgaatccttagagtatttgtacttcggatttgttttacggtattccttcgacgtgtaagccacttcgtaatgcgcttcaaatgatttgatgagctgttctatttcttcggcattccctgccagtctgacttgtgccacatctctcctccgctttcataaaaaaacttgtaccattaaatactttatcatagtatatcatttttttaacaggaaaagataacctcaattaaggattggaaggcgggtgactgtcgatggcgcaatcggaattcaaggaatacatacacattaatctggctatggtacttccccatgtagagcagaacgatgacctggttcaaaataaaaagatgcttccgaacgggcttgttttttattatatgtatctgagtgaaatgaacgatgaagacaaaataaaagaagcgattgaaacgctgcttcacgaagaagacgccttaacactggaaacggtgacgaaacgtcttgataagattgacgcccgccccgtctttacggcgaaggaagccgtcatctccattctgcgggggaaatgtgccatgtttattaacggccttgaccatgtgtacattctgtccaccggaaaaagagaaaaaagaagcgtaacagaacccacatctgaaaaggtcgtaagagggcctaaaatcgccttcatagaagattctgatacaaacgtcgccatgatcaggcagcggacgaaccatccgaagctgaaaacgaaaaaggttccgatcggagaaaacaagctgaaatacgccactgtcatgtacatcgatgatgaggcggacccatctgtcgtcaatgatgttttaaagcgtctcagcaaagtgaagatggatgacattcaggattccggaacgcttgaggagcttattgaggataataagtattcgccgtttccgcaaatacaaaataccgaacggcctgataaagtctcttccgccttgtttaacggccgcgtcgccatccttgtcgacaactcaccgtttgcgctcgtggtcccggcttctttaggaattttaatgcagtctcccgatgattattatgaacggtggatttccgcctcgctcatccgggcgctgcggtttacatctatttttatcacgctgtttttttcgtccatttatatcgcgctcgtttcatttcaccaagggcttctgccgacgtcgcttgcagtcaccatcgcggcgaacagagaaaacgtccccttcccgcctatcatcgaagcgatggtaatggaaatgacgatagagctgctgagagaggcgggcttgagacttccgagcccgctcggccagacgatcggattggtgggcggagtcgtcatcggtcaggcggccgttgaggcgaatcttgtcagctctatcatggtgatcgtggtcagtattgtcgcgctcgcttcatttacggtgccgcagtacgggatggggctttcattccgtgtgctccgtttcatttcgatgtttactgccgcggctttcgggttgtacggcatgattttatttatgctggcgatctacactcatttatcgagacagcgaagcttcggttctccgtatttctcgccgaatgggtttttcagcttaaaaaacgcaaacgattctattctccgtctccctattaaaaatcaaccaaaagaggcgaaaaacgtaaatgagccagaaaacaactcacaataagcttacaagctatcaagggacagcattgatttccaacacgatgctcggtgcgggcctcctcaccatgccgcgtgcgctgtcatcaaaggcgaattcgccggacggctggatcgcattatgtctggaaggcatcatctttatcctattgatttatctcaacacgctcattatgaaaaagcatcagtacgaatcattttttgattatatgaaagaaggtctcggcaaatgggcgggaaatatcgtcaatctcatgatctgcctctattttataggagtcgccagcttcgaagcccgggcgatggcggaaatggtcaaattctttttattggaaagaacgcccgtgccggtcacgctgtttatctttatcgcctgttctatttatttgattatcggcggcataaatgatatcggcaggctctttcctttctatttaacgattacgattattattttgctggtggtgtcttctttcagctttaaaatatttgatatcgacaatctgcggccggttctcggacaggggttttctcccgttatggcctccttgaccgtcgtttctgtttcctttttgggcattgaggttatgctgtttctccccgagtacctcaaaaataaaaagcacacgttccgtatgtcggctgcgggtttcggcatcccgattattttatatattattaccttcgtcctcgtcgtcggcgccttaaccacccaggatgtcaaaacaatgatctggcctacaatcgcgctctttcagtcatttgaaattaaagggctttttatcgaaaggtttgagtcctttttgcttgcggtctggattatccaatttttcaccacctatgtatcgtacggatatttcgcgacgtcaggccttaataaaattttcgggctgaagcagaaaaaaggtgtcatcttcgtaggcatcgcgacattcttcgggtccttgatgccaaaagacgctaacaagctgatgctgttcagtgatattctcggctacatcttcttaggtttctttttgctgcctttactgatgtttgcagtcgtcgctgtgaaaaggaaggtgaaaaaagcacaatgaagaaatatatcgtcatcatcctttctacattgcttttggccggatgctgggacagccggaatatagaagatttgagccttgttatcggagtcgggctcgataaacctgaggaagaaaacgtggaagtgactcagcagattctgatcccgcaaaaagcaagttcacagcagtcgtcatcaagcagcccgacaaaggtgacttccacttccggggaaaccgtccatcaagccttaaggacggcatcattaaaaaatcaccccgcattctcccagcacttgcgcatcatgctgttttctgaagcgctgttaaaagacggcatcccgcttgacgcattgatgaaccaatttgtcagggacaatggaacgagaagaagctgcaatgtgatgacagtgccggacaaaacgaaagatattttcaatgtcagtgatcagggggagcctgcgtcaaatacgatctatgacttaacagagaataacgcggtcaccatccgaatgatgaagcccgtgacattgggggaaatatccgagaaaatcacaaaaggcgaaaccttcgtccttcctcaagtgcgcaaagtgggcagcaggctggaaatctggggcgcatccattataaaaaataaattctggtatgcggatttaacgccttttcaagtccagaatatgaacctgttcacaggcacggtaaagggaggcgtcacatttgcaaagcatgataattattatttatcgttcgaggtattttccagcaaatatgatgtgaaaacacaatataaaaacgggaaattcaagtttatcgtcacccggtttgttgaaggccgtctgtctgaggattggaacccgaaagaagattcctttaaggagtcctatataaatgaaatcaaaaacacggtaaaacgcagcatccattcagatgttatgacattcattgattatctgcagcatgatttaaaagtcgatattaccggtttggataatcaggtccggattcattatcctgacaagtggaaaaaggtgtcgtcagattgggatcatcatttcagtgaatccgatattgaatacaaagtcaaagtcgccatcagagatttcggaacaaagggaatgtcccaataacctgtcccttgggagagtgtgcatagcgccgctctcctttgtttatgtcacgagatgattgcggtgggcatatacggctgcctgcgtgcggtcactgacatcaagctttgacaatatattcgtgatgtgggttttcaccgttttaatcgttatgaacagctcttctccaatttctttgttcgtcttgccttccgcgacgagacagaggatttccagttctctttttgtcagtgtttcatgcggaagctgattctctgaatggcgcagccttgacagcacttttcccgccaccttcgattcaagcttcggttcgcccttggcagccgctctgatggcttcggctatttctgccgctttagatgttttcagcaaatagctgagcgcccccgcttcgatcaccggatacactttgtcgtcatcaataaagctcgtcagcacgatgattttcggatcattgagtttcgcacagatctgttttgtcgcttcgatgccgtccatgccgtccatgacaagatccattaaaatgacatccggcaaaagctctgcggccagatcgacgccctgctgtccgtctgacgcttcaccggcgacttcaatgtccggctgtgcttctaaaaatgcggccaggcccatcctgaccatttcgtgatcatcaatcagtaacactcgaatcactgtcgttctctccttttgttttctgataaatcgggactttcacgtcgatctgcgtgccttttcccttcacggagataatttccgctatgccgccgatttcactcgctctttccttgatggaatgcaggccataagaggatgctttgacttgatccatcgtaaaacccgccccgttatcaatgactttaagctgcagcttttgatgtttcgcgccgagcctgacggtgaccttggtcgcctttgaatgcctgaaaacgttggaaagcgcctcctgcacgattcggaacagatggtcttcaacgccttttgacacacccatgtcgctgatatcccactcaatatcaagcggctgcttcgctttgaactcttttaacagctcaatcagcccttctttcagaccttttccttctaaagtgacgggccgcaaatgcaatagcagcgctctcatttcattttgcgcttcgcccgccatatgttcaaccatgcggatccgtttaacgattttgtcatctgcatctttcacttgctctaggacggcggatgtcatcattgaaatggcaaagagctgctggctgacggcatcgtgcagatcgcgcgccagccgctggcgttcttcagtgatgactgattttttcatttgatcctgccattccgcccgctcgttggagagcttttggagcgatgtgacctgcagctcgacccgcttggccatttcgttgagctggtctgccgccaggccgatttcatcatcgccgagcggcggcacccgataggcgaaattgccgttttcaaatttcaaaaccgcttcaatcaatgtatccattcttgttttcagacggccgccgtatacataaccggagatcagtccggccgaaagggacgccaaaagcaggatgaccacgaacggaataccgaaccagccggaagaaaacaaaagcatcgggtcaagcccgtaatataacagcatcagcgtaataaacacagcgcaaagaagcagactgagccccgcggtcatcctcatggcgcgccactgaatattggcgagtaattttttcctcataaatacttcacatccacatcgccgatgaataacgaaattgatattttaatgcgccgcggcgagtcgccgtactcgggagacactttatacaggttcgtgctcatgccgcttttcttagagccgagcagattcatatcgccgataaaagctgacgaactgacggacacttcgatatcgggcgggacgtacacatcaacattgccgatgacaccgctgattgtcatcgtgctttctccttcgggaatcatcgcttttgacagatcgattttcacatctccgatgaatccggagacatttaaatcattcagctcaaacggatccttcatcatgcgcagctcgccgataaaatagctgcggagatccggctgtctgctttccggctgggcggaaggctttggctgctcttcttttttaagattgattttcttctctttatgttcaaacacgcgctttcctttaagaagcctgtagcccgcgtaaatgagaaaggcggcaaaggcatagccgaacaggttgaaggtggcgctgaacaggtttctcaaaaacaaaaaagcggcgaagatatacaggacggagccgagccagccgcgggaatatttattaaaaatatagcctgtgatcagaaaaaagagcggccaaaacaagaagtcgccgataccgataatacgtaaaaacatgctgacgccaaataaggcgatgataagtccgagaatctgtttttttgccatttcagctgcttgcccctcctttccttttctattgcagtgcaatattgccgctcgtcacttttatatcaatcattcttgagccgctgcctttaatgcctgtgaaagccccgccttccttactcgttttctcaaaggaataggacggctggattctcccgcttgccgtttcggcgttcaccgtaaaactcccgtctttcggcaggctgatggctgcgctgccgctcgcaagcctgacggatacgggggcacttgccgtctcaagcgaggcatcgacactgccggaagcgacccgcacgtcaagagggcctgacacatgatgaagaccgacatttccggaggataagcggacatccgccgtttttgccgcaagaccggctgctgtgagatcgcccgacagccctttcgcttcaaacacatccgtctttacatgcttcagcgacatgttcccgcttacagtatggacgccgagatgtgaaagagacagccccctgtttccgtcaactgcaatgctgccgcttgatgaacggacggtgatgtcctgatggtaatcatacggaatgcggacaatcagcagaggacgctgaaaaagattcagaaattggaaccctttctccttcgctttgagatcgagggttttcccccggctgcggacaaacatttttcccgccggtcccgtcacgtttgccgagatatcattccgcgcttccgcgataattttcacatccgtctgttcagatgaaacggataagcttttaacggcacggggcggtacgcttaccgattctgtttctgtttcgtacagcggaaaaaaacgcccggcaaccacttctttcaccaaaaacagacagcagatcagaacggacgccgccatcagccctttggcaatcttacgcttcattacgttccatcctttttcattcattttattataaaggaaaagcctgataattgatacgtgcgtatagggaagaggcgtaaaagcgccgatcttcccttgtgcacattattcatgagccgctttttgatactccgttttttccagagaaagcgagcgcattttttcaagctcagcttcgacctcgtccgaatattgcgaacggctgacttctgtgttcgcctcagccgaagtgccgtatttgacgcgaacttccatttcttcaatgcggttttccattcgaaggaactctctgtaggcgctttcgctgtcaattttgtcaaaagaagcgttcatatgttccttcgctttcgccgcgttggcacgggcgatgagcgcctgttttttatcctttacgtcgcgaagacgcgtttccagagtctccagctgctctttcagctctgccagctgtgttttcgcctggtcatacgctttttcatgttcggccgcttttccctcaaggtacttcatttcagtcagagcctttttcgcaagctcctcttcccctgcgtcaaaggcaagctgagcttgatttttccgcttggccgccgtttctgaggcgtcctcttgttttttcttaaactgatggacgattgtgtgctgtttgacaatcgtttgtttcgccttggcgatgtcactttccatgtcacgcacatattgattcagcatgactttcggattttctaatttatcaagcccttcattaacagatgcgacgaacatatctcttattctttttaagaccattttgttttcctccttattttttcttcaaaaattcttcccattcagaatcaaagccggattgatagcccggtgatgccgcttccggttcatactgccgggaatcagcgtctgagccgccctgcttcatcatcttccacccgaaatacaccatggcgccagccagtccgatagctacgataaacggaagagagccgacgagaatcatagccccgatgacgcccgcgatgataccggatacggcgcggccttttgaaaaccgttttattccccagtaaagcatcaggcctccgatcgccagcgggatgataaatgcgaagtggccccctccgaaaaagacagaaagtccgaacacaatcagcaggaagccgcctgccgtttttacatttatattcatgcagatcctcctttcgttttccttgtctttactataaacaaatcccgcggacggcaaaacgagtcagagattgattttcatatcagaccggagtcgtataagcccccggacccttacataaaaaaacgccgctgcgccagacggcgcagggcgttttacggaaatgctagattctgacgctcgcttctttttccctgatgagatcggagcgttccgctttggccagcttcgtaaaaaacaatattccgagaccggacaggacttcgacgagaccgccggcggcgatgacttttccggaaccgaaagcgttagccgcgtatccgcatagaaccgcaccgagcggaatggatatgtttgagatcatatggatgacggcataaacttgcggctggtcatcattgtccacagacgtctgaataatggtatattccggcacattaatagcactgacggcagatccgaacgcaaacgcggcgaggaagacgagcggcagaaaagtgttgatgcccgtgatgaaaaatgccgccccttctatgattcccgccgacacaaacaggagaccgtatttgttcaccttcacttttgccaaaataaaacccattaaaaaggctccgcccgtgcctgtcgctttcagaagcgagtagatgatcggcggcatgtgtaaatcttcagcgacataaacggcagagagcgcctcccatggagcggccgcaaaattcatgaagatacagtagatagcgagcgggtataaaatctggtgttttctgacaagcacaaaaccccgtttgagtcttccgaaatacgttccgcgctgtttaacggcgacggtcttctgtttatcctgatgaacttggtatgcaataaagagtacgagaaaacctgatagaagatagaatataagtgcgataaacaaagaataggcgggactgataaaagttagaaacaccccgctcagcgtaatagcggcaagcctgacgatctggccggatgactggatgaccgcattcgctttctgcaggctgttttctccgacaatattggggattaacgagatggatgcaggattataagcggctcccgtggctgaatgcacgatcatgaggagcatgacaaaccataaaggagagaaaccgttaaaataacagaccggaatgattaacacgaccgccgcgcgcgtgaggtcggaaaaatacatccagaatttcagcgtatgctgcttcataaaaggcccggtaatcggcgccagcatcgcctccggaaggaacgtgaccgcaatcagcagagccgtgccgatcgcgccttctccgtcaaaaatcaaaaaccatagaatggaattaaaggcaaaaccgtctcccgacaatttgacaagccttgagataaacagaaaggtgaaatttttattccagatgctctcgctcttattatatgtatccatctatcaaatcccccattattttacagcatttcttataatatctcattttttaatttttcagtcaataatgcataagatacattttcctactggcaataagggttcaaatgatgggtatctccacaaaaaaacagccggcatgctgccgccggctgaatgaaacgttattcatcctcacggaatactgcggcgcttctctcatactctatatccttaacgccttgtcttgtgttgattgctcttgccgccgcaaaaaaataatcagacaggcggttcaagtaacgcagcaccgtatcgtttatctcttctgttttgcccagtttcacggtgagacgctccgcccgtcttgtgacggtccgcgcgatgtgaagctgagcagccgccttatgcccgcccggaagaataaatttctcaagcgggggcgcttcagccgtataacggtctatgcagtcttccaatacggaaatagatttctctctcaatttatagttcttatgctcagtgacagtcgccaaatcgccgccgcagtcaaacagctcgtgctgaatgtttcggagttcggctttcagatcaccgcaattctcacaatcagcaagctccgcaagcgcaagcccgataaaactgttcagctcatcaatcgtcccgtagctctcaacccgcagactgtctttatccgttctgccgccgatcaggcttgtctgtcctttatcgccggttttcgtatagagcttcatcgatctattcctccttcttcctccgcttttacacatgccgcgatcccgcttctgacggctttttccgcatgacgggcgtccactgcctctcccgtctgcaaagcggcgatgacaatatcaccatttgcctgcattccggaaagagcctgcattctcgcttctgccgctgccgttaagagccgtacaaatccctgttcagataaacgtccgctgacgagtgcccaaacggtgtgccgcgccgtcacggcaatcgtaaccgaatcaaacgtccggcagaccaaaccagcggccgctgagccggaaagccggcggctccatgaaaaaccagatccgtcagatgcggttgacaacattctaaacggccggtctgtatgaagcgttacggtatttccgcttttgtttatcagagaggcgaacggaacggtgacggattctctttcttcccgcacttccggcttgaaggcgatcagcggtttcggcgacgcttgttggtcaacagcgctgacggtgatgccgtaaatatcttcaatcgtctcttgtttcaaagcctgctccggcggctgcttcgaaaaagcgcgtccgtccttcatcatcaggagctgatcacagtattgtcccgcggcgttgaggtcgtgaaaaatactgatgaccgtaagacccctttctctcgtcagccgctttaccgtatcgagcaggtctttttgatatttgagatcaagaaatgtcgtcggctcatccagacaaagcacctcgggctgctgagccagcgcctgcgccaaatagacgcgctgcctttctccgccgctcagattgcggacggattgctgcgcatatcgggcgatgcccgccatttccatcgcttcccggataatgtcttcgtcgttttggtccgtctgtctgaagagtcctttttgaaacggatatctgccgaaggacaccgtttctttgacggtaaatgtaaaggcttgttccgtatgctgcggcaaaacggccatgattttcgcaagctcccgcggcttgtatctgccgatgggcttgcctgctgcgagcacctcgccttttgagggagggagcacccccgtcagcagtttcatcagtgttgtttttcctgagccgttcggaccgagtatgccgacaaattcacccttttcggcggtaaagctgacatcctctacaatcatccgccctccgtacccgccggacaggctgctcaccctgatcataagcgtttccctccatggtgctgacgaagcagaatcaaggcaaatacaggcgctcccgccaatgccgtcataatgccgatcggcaattcgacaggttcaataacggtgcgggaaaacaaatccgccaaaatgagaaaaccggcgcccgtcagtgctgacagcggcagtaaatggcgatgatccgttccccataaaagccgcgtcacatgaggaatgacaaggccgacaaacccgatcgtccccgatacggcaaccgctcctcccgtcagcagagatccggcggtaatcatcagcagttttctctttcccgtactgacgcctaaaagccttgccttttcttctccataggtcataatgtttaattctctgccgttgataagcagaagcgccgtcccggccagaaaaaaaggcagaaacagcgcgacatagccccagcccctcattgacacactgcctaacagccagcggacaatcgggagcagatcatttcccgttaaagcgatcacaagcgaaatgagggctccgagaaaagaattcatgatgatgcctgtcaaaatgagcgtcgaaaccgacatggacgcatgaacgaggcggctgaaaaaaagaaccgccgccatgaccgcaatggctgcggcaatgctgacgaccggaagtgtgaaccggccgatgacgggaatctgaatgccgaaaaacaaagtgataacggctcccgccgaggctcctgaagataccccgagtgtataagggtcggcgagcggatttttcagaagcccctgaaacgccgctcccgcaatggataacgcggcaccgacaagggctgccagaacgactctcggcagacggatattcatcataatatttacattcatgggatcaacagaggaggtccggccgatcccgatcaaaaaaacgtcggataaagggatatgcagactgccgattgaaatgccgagtgccgtacaaacggctaaaaacagcaggctgatcgtgtaggccagcgggcggttactttttaaacgtttcaggataaacgctttctgcaagcttctcgaccccttttaccagacgcgggccagagcgtgtgacaaggtcaggatcaacagaatagacgttgtggtgtttgaccgcattgacggcaccccagccggcgcgtttttccacttcagcggcctttacgccgtctgtcgtaatgatgacatccggattcattttgacaatcgcttcatccgtcagctgcacccagccggtctggctgccggcggcgtttttcgcatgtatatcttcaagcatttcgttcataaacgtgccttttcccgtcgtgtatccgtcaggagaaacttcgacgaatactttcttttcatctttttcagaaatggccgccgctttcttttctatggcggaaaggtcggatttcatcgatttgatcagcttgtccgcctgcttttctttgccggccgcttttccgatcatgctgattgatttgtacacttcttggaacgattgagcgtcattgaccgttaatacggtgatgcccgcatcttttaattgcttcatcgcatcggcggaagcggacatagaggacgcgtgggcaagcacgagatccggcttcagcgcgatgactttctcagcgttcacattcatatctccgactttcggtttttttaccgcttctttcggatatgtatcatttgtcgtgacgcctgcgaccttatctccgagccccagcgcgtatgtaatttccgtattgctcggcatgagggaaacgattttttccggcgcctgctttatggttactttttcgtttgcggcatccttaatggttaccggaaatgcttcggctgagacggctttttgttttgccgcgcttccttcttcttgtgcgccggaacagccggcgaccataaaggcggtgacaaagagcgccgcccagacggcagtgattttcttcattcttttaactccccctggttatggtaaacgattgtctctttgacattcgtatccttttttcgcagtaattatactataagtctgtcaggcttgtatatccggccttttttgcattaaagcaaattgttcgtaaacactaaaacccatcatgtatactgttacacaatcatgttaagaggaggatcatcatggaattacagcttgaacgaaagctcattttgattacaggatcaacttcaggcatcggaaaagccgcggcaaaaagctttttagccgaaggcgccgaggtgattgtaaacggaagaaaaaaagaaaccgtggaacggacggttgaggagctttccgcttacggaacggttcacggcatcgccgctgatttatcgcgtcaggatgaagcggatgacctgatgaagcgcgccggcggaatcggagaagtcgatattctcgtcaataacctcggattttttgaagtaaaagacttcgctgaggtgactgatgatgaatggacccggtattttgaagtgaatgtcatgagcgccgtgcgcctgtgccggcgttttctgccgcaaatgctcgaaagaaacagcggtcggattctgaacatctctagtgaagccggtgtcaaaccgcttgcgcaaatgattccgtattcaatgacgaaaacggcgttaatcagcttgtctcggggaatggcggaaatgacgaaaggcacaaatgtcacggtaaactccgtgctgcccggaccgacatggaccgaaggcgtcgcttcttacatggaaggagccgctaaggctgccggagaagatacggacagcttcgtccgggattattttaaagtgaatgaaccgacgtccttgattcagcgctacgcaacgccggaagaagtcgccaatacgattgtatttctcgcttcagatgcggcatctgccattaacggcatcgcacagcgggttgaaggcggcatcatccgctccatttaaccaaaaaaagcccggcacaatgggaactcccatatatgccagggctttttttatatcatgcctgcaaacggaaccggctcccagccgcccgtctcaagctctgcggaaaacaggccgcccgcatgcggctgctcaagtctttcggcttccgtcaatttttccgtcgcggtcgtaatgtataatgtgttaagctctttgcctccgaacgcgcagcaggtgacgtattttgcgggaacttcaatagatgcgatttccttatgcgaaaacgggtcaatccggacggcacggccgcctccgaacagagccacccacagcattccgtcccggtcaatggtcattccgtcgggagatccttgcgacttcggaaatcggtaaaccgttttcggatctgatacggctccggtttccggatcgtatgaataacggacgatttcctgcgtcggagtatcgatataatacatcaggtttcggtctcgatcccaatccagaccgttcgaagtagagacctggtcttttattttggcaaggctgccgtccgtattcagacggtacagcgaagcctcctcttctttgccttccatgctcgtcgttcccgcccataatcttccggacgggtcgcacttggcgtcattgaaacggatatcttcccgcatgtctttcggctgcttcatcttcgtcaacgtatcttcctgcagattgtacaggtaaaaaccgtctttcatcgtcatcaccagctcttcctttgaatacaaagccagagccgttacgaatgatttgaatttaacggaacggttgattccgtcagccggagtaaagatatggagctggctgcccagtatatccacccagtacaggcattccttgtccttatcccataaggggccttctccgatcaccgctctcgtatctgctcgtaatgctgcttccatgtgtgaacacctcttttgcttgtcagtctcctattgttattcccgacaaagcggcgtccaaactcaatcttttttaaaaagaatcgtaataaccgttccggcgctgattctgctgttgacatgaatggttccgttatgaagatgcaccagttccttggcaatggcgagtccgagccccgttccttctgacggccccttcgtattcgttccccggtaataacggttaaacagctggtgaatcgtttcttcgtccattcctcttccgttatctttcaccttcagaatcagctgttcggctgattcctcgagcacgacccgaatggcggtccctttcttattatgctttacggcgtttgccagcagattctccagaatacggcggaaccatgcttcatcaatggcgaaaagaatgtcttcctttttggtttcaaaggcgatgtcatagccttccgagaacgtgtttttcgtgaaatcgttcgtgacgtttctgataaacggaacgacgttgatcagccgccgttcaatcgggagggcggcgtttttcagccggtatgtcaagtttaagtcctcaatcagcttcgacatatattctgatttttcccggacgatctgccccatttctttgacttcctccggggtccagtcgtattgcttcgattcaagcatcatgctgtagccgtaaatcgtgctcagcggtgtttttaaatcatggctgagtccggcgatccattcttccctagtcgcctggattttttctctgtttttcttatcccgcttcagcgtatcggtcagctggtccatcgattcgaaaatctcggcgaaaaagcggaacggctgctttgttttgccttttttgtttttgctgaccggctgtcctttgcggttcttcggctcttcaagccggccctttgataaattgacaagccatttgatggtatgaaaaagcggccatccgaaacggaaagagtaccagattgtcagaatacagatcattaataccaagattccgatcagcaaaaagagggttttcatcacatttctcaaaaatgacttattaaactcatgatcggggatgtacacggggttcggcaccgacgcgaccatccatttcgttttatcgagtcttttaaaagaaatttccctcttataattccacggcttggaattgtatttcagcaattcaagctcattgacggtgttccgctcttttttggtgctgttgatatctccgagcagtctgccgctgtcctcgagaagatagaccgcccctttttcccgtttaatataatcaaccgtgctttttttatattgagaaagggaagcgagggacggctcctgtgattcgatgtaagtgagaagctgctcgctggcggatttccagccgaacagaatcaaataggtctcattattaatcgtgaccgtccagtagttcagcttgtagttgtcaaaattccggtactgataaatggataagagatcttttctgctgtaatggctcgggacgtctttcggcactctgtacgcgtagtccgttttttcattgtcattaatgatctgcagccagcccttctgctttctgactgacatctttaaaaattcatcgacatcccatgtgccgtcttcatttttatcaagccacgcttcaaacgagtcagccgtcgctttcgtcagtcccgcattggcttccgcttcgctgaaacgccaatccaaatagaaaaaagaagcgacggccaaaacagagatcagcaggatgacaagcagcagctgcccgaaaaagtggagcagaaattttccgcgcattctcatgggcgggttcctttttctccttgatcgggaataaaccgatagccgaggccgcgcaccgttacaatataggacggatcgcttgggtctttttcaatcttttctctgagcttgcggatgtgcaccatgacggtgttgttgtcgccgtaagacggatatccccacactttttcatagatctggtcttttgagagcaccacatcagggtgttcgcagaaatattgcagcaattgcaaaagctgtgcggagcagctgacgggctcgcccccgacaatcagctcggcgttttgcggcgaataggaaaaatggctgtatgaatacgtcttcaccgccgttttctcttcgcgcttataggttctttttaacgtcgccctgatccgcgccgccaattcgagcggattaaacggctttgttatataatcatcagctcccaatgcaaatcctgacagcttatccgcatcagaagaccgggcagtcagaaaaaagatcggagcatcggtatagttccggatttcggtgcatgcttcaaaaccggacatgccttccatcatcacatccagcacgagcagatccgcggtttcatgtttaacaaattcaatcgcttcctcggcgctgccggctgtcttaatgttgtgatagccttctttgacgagaacgcgtttgaccatatcaacgatcgccttctcatcgtctacaattaaaattgacgcattttccaccttggacgttcctttctctttgtttttttcatcatatcattatatggttaagatttggtacttttttagtgcggaggtcttgcggggagacagaaaagaaaaacgagaccggatatcttctctcgtttttctcgcggtgggcagagcggtatatcagtcatcccgcccttttgtcaggagttttcatttataagatgtagaataaattcccaaaatccaggcacttcctggcataacagcatgtccgctttttcaactattttaatctttaattcttgttccaaatcttctctttcctggtaagacgtattgctcagttttttttttatcattggcgaaaaacgtgatatcaagagttccatttcgtcgatatctgttttctctttgttgaaatcaaatggcccgttcactgcttattttccccctttttttgcttgtccagctgctttctcagattgccgagcccttttttatgaatattggaaatgttctgccgggattcccccagcgactcggcaatctccttcatcgtcgctccgtgaaggtaaatattcgtcagcacacttttttgtttatcggttaatgtctgaagcgcttcatataaatcccggttttggacatgctggctcaaatctccctgctgccgcagaaactcttcatacgcgtcttttcccatttcatagggaagcgtttcacctccttccggctgatcaaccgtcagcggatagcgcttctgatttttgcggatgcgcttgtcaaagtcgatggagaaaatccggatcatagagttcatatatttgatgatccggatttccttataaaactgcttaaaatgttcgtccagtgattttgcatctttctcgtctgaatgttccagcacatttttaaatttctcgtaatgcttggggtcacttaaaaaatgtttgacgatcggatgtttcatgatttccttgcattttgaccgtaaaagaacttgatagtccataaaaccgcctcctatttaaattaaatgaaagaaagcaaaaaaaagtaaactactcctttccgactaaggttttacactccttatgtcccggtttttccggaacaaaaaaagactctcagcccggatatcaggtttacaagagccgctctttctttcacttatatacatgactgcaggtcaagtcaggaggtggctgataatggatcaggtttttatagaagaagcagtcagacagatcggcaatctcggctttccggctctgattgccatgtaccttctcacccggtttgagaagaaatttgacgccctgatcgagctgatgacggaactgaaagaccagaagatgaaaaattaattttcaaacgaagttgacttttcatcggaacgcatcacttaacaaagcagaagggaaaacgaaaggcctttcacattctctttctgaaaaaaacaaagcttgagaggagacgatttacatgtcaaaagaaaacaactgcaatatcccgcagccgatcagaggagataaaggggcgaccgtcacgattccgcgcaaccttgaaagagaccgccaaaatccggatatgctggtgccgccggaaacggatcacggcacagtggataatatgaaattctctttctcagatgtgcacaaccggctggaaaagggcggatacgcgcgtgaggtgaccgttcgcgagctgccgatttctaaaaatctcgcatctgtcaacatgcgtttaaaaccgggcgccatccgtgagctgcactggcataaagaagcggaatgggcttatatgctgacgggcaaagcgcggatcacgattgtcgatgagcaggggcgcagttttatcgatgacgtgaaggaaggagatctgtggtacttcccgtcaggtctgccgcactccattcaggcgctgaaagaaggctgtgaattcctcttagtctttgatgacggctcattctcagaaaacagcacattccaagtgactgactggcttgcccacacgccgcttgatgtcatcgccaacaacttcggggtttcagaaaaagaccttgccggcctgccgcggaaagaaaaatatatctttgaagagcctgttcccggaaagctgaaagatgacattgtggaagggccgaacggcgaagtgccttacccgttcacttaccgtctgctggatgaaggcccgactgctgagacggacggcggcaaagtatatatcgcggattccacaaacttcaaagtgtccaaaacgatcgcttcagcgcttgtcgtggtcgaaccgggcgcaatgagagagctgcactggcatccgaatacgcatgaatggcagtattatatttccgggaaaggccggatgacggtttttgcttcggacggccatgcgagaacatttaactatcaggccggggatgtcggttacgttccgttcgcaatgggccactatgtggagaacctgggagatgagccgctcgtcttcttggaaatcttcaaagatgaccattatgccgatgtgtctctgaaccaatggctcgccatgcttcctgagaaattcgtccagcagcatcttgaactgggcaaagactttaccgacattctttcgaaagagaaacatccagtcgtcaaaaagaaatgctgaagacacacattgacttgcagagttcatctctgcaagtctcctctatgtgaaaaggagctgagcagatgatcaatcaaaacgggccgaaattgttttttttccgggtgctcacgtatgccctggcagcggccgctgtattattcgggtatttcatcgtgatgatgaccgtattttcattagccgggacgagctacggatcgatggcgtacgtcctgcttttttctgtgctttttattcttctcgggttatgttttgaaccgcttgagcggctgatggtacatagttttacctttttcaggacgggcaggctgccttttcttcttttagccagcaccgttcagctgctgtttctttggatgaccgcgtatacgacggataaactgattgaaaagatttggctgtcaacgaccgaggagctgattgtggctggggtttttttcgtgttggataaatgcgtctccgtgcagaaacaaactcaggcgcaataaaaaaacgcaggccgaaatggctctgcgtttttaccgtcataccgaggcgttttcatgctggattaaatcgtaggttaagcagacgggtttgttcgtgcgcgggtcttttacgatctgtgcgtcaatctgaaacacgtcttccaatatgccgggcgtcatgacttcctccgccgtcccttccttgatgacgcgtccttttttcagcgcgatcatataatgggaaaaacgggcggcatggttcagatcatgaatgaccattaaaatggttcgtccctgctctttgtttaatttgtccagcagctgcagaatttccagctgatgggcaagatctaagtaagtagtcggttcatcaagaagcagcagctccgtttcttgagcgagcgccattgcgatccacacacgctgccgctgcccgccggaaagcgcttcgatcggccggtcgtaaaattcggccatccccgtctcttcaagcgcccatttgaccatgtcacgatctttatcactcaagcggcccattccggactgatgcggaaatctgccgtaagaaacaagttcgtatacagtcagcccgctcggcgcttcaggcgtctgcggaaggattgccatttccttggcgatgtccttcgttgattttttcatgatcgcctgtccgtttaaatagacggcgccggatttcggtttcatgattcttgacatcgtcttaagaaccgtcgattttccgcagccgtttggaccgatcagcgttgtaattttccctttcggtatggcgatatccaattctttcgctatcagacggtcaccataaccgacagtaagctgttccgccgataatgagttcatcgcggcagtctccctcctttatttcgctttcatcagcaaatatataaaatacggcgcgccgagtacggaaatcaccaagccgacgggaacttcgaacgtcacaaggacatttctcgccagcgtatcggcaaggagaaataaaaatgcgccgatcaaagctgaaaccggaataagcgtctggtggcgcggcccggtaagccttctggccaaatgcggcgcaatcagtccgagaaaagcgattccgccggctgccgcaacacatgacgccgtcagggcgacagcggaaatcagcagaacgcgccgctccttttcaacccgggtgccaagtcccacagccagctggtcaccaagctgcagcacatttaaatacctcgctttatacagactgaacggcagaagaaccagcagccacggcaaaatcgacagcaccattttccaattggcgttccaaatcgaaccggaaatccatacaagcgcctgcatgaaatcccgcgggtccattttcagctgaaaaatcaagagcagcgcattaaaccccgcattaacgccaatcccgaccaaaatgagccggacgggtgagacaccttttttccaagccagcacgtagatgagaaacgcagccagaaaagctcccgccaaagcgctcactggaagcagccatgtactgaacatgcttaaatcaacagcggacccttggaaaaagaaaataaacagaacgaccgccaatgatgctccggcgttaataccgagaatgcccggctccgccaagtcattttgagacacgctttgaaaaatcgcgcctgcaaccgcgatcccggcgccgaccagcaatgacagcaccatgcgcgggagtctgaattcaaataaaacaagctgatcccgggcatcgccttgtccgaaaaagactcgtaacgtatcgagaggcgcaatccggatcacacccatatttaagctgataaaaaagacgatgcatatgagcaataacgtaacggccgcgaccgccagcggttttttcgatttcacattcattacagccctctcctttccctgcgcgccaaataaaagaaaaagggaacgccgataagggcggttaaagcgccgaccggtgtttcaaacggcgcattgacgagtcttgcggcaatatcactgaagactaacagaacggcgccgaataccgcggaacaaggaataatccacctataatcgaccccgactaaaaatcgggtgatatgcggaatcaccaagccgataaaagaaatggctccggcgactgagactgaagcccctgtcagcaggacaacgacaaacattccgattactttcacaagcgccgtatactgcccgagccctttggccagctcctcacccaagctcagcactgtcactgagcgcgcaatcaaaaaggcaagcaaaaggccgatgaccccgactgccaatagcagctgcacgccttcccatttcacggacgcgactcccccggcataccagaacttcacatcctgggcgacgtcaaaccggatcgcaatcgcgcttgaaagcccagtcaagaaatagccgactgccgtaccggccagcgcgagcttcacaggtgtcagcccgccttttgaaaacaggccgatgccaaaaacaataagcgccccgattcccgctcccgcaaaggaccacaagacaagccccgctgcagacagccccggaaaaaaagcaaatgcacaagcgatcgcaaagccggaccccgaagtcacccccataatggaaggctcagcaagcgggttccgcgtcagcccctgcatgattgccccggacacagctaaaaaagccccgacgagcgctgcggcggcggttctcggcagcctcagatcgcgtatgatttgatgagatgtattttgcggctgaaagtgaaagagagcgttccacaccgtccgcagatgaatatcagcggctccgatggaaacagacaaaactgcgccgatcaataaaaccgcaataccggcaaaaagcagcacagccgctctgaatgaacgcgccgtccactggatttcgctccctgacgctccttgagccgtcattgtctgtttcttttttaatagacccaacactcgttcttcctttctccaagacaagaatgttaatgataatgattatcaatgacttgtttcagtatagcactattttcttctcttttaatagacctaatttcatataaaaaaagaaagtttttcttaaaaaagagcgtgcttctctatgaaagcagtgatataatcacactgataatgattctctttatcactattttttatgaaagaaggaatgccagatgttccatacatacaagaaaatcggcgcagcgctgattgccgtactgctcattgccgctttggccgcatgcggaaattcttcagacacgaaaggttcttctgaaaaagaagaaaccgtcacgtataaagccgaaaacggcaatattaaaattccgaagcacccgaaacgggtcgtcgttatggctgacggctactacggcgacttcaaacagctcggcatcaatgttgtcggcgcgccgcaaaacgtatttaaaaacccttattacaaagggaaaacaaaaggtgtgacaaacatcggcgacggcacatccgttgaaaaaatcattgacctgaagcctgatttaatcgttgtctggacgacacaaggggccgatattgaaaaactggagaaaatcgcgccgacaatcgctattaaatatgacaagctcagcaacattgagcaattcaaagagtttgcgaaaatgacaggcactgaagataaagcagacaaatggcttgccgaatgggataagaaaacagctgccgctaaaacaaaagttcaaaaagcagtcggctcaaaaaccatctccatcatgcagacaaacggtaaagacatctatgtattcggtaaagacttcggtcgcgggggaagcatcatttatgacaaactcgggctgaaagccacaaaactaacgcaggaaaaagccattaatcaaggcccgggctatgccagcatttcacttgaaaaactgcctgacttcgcaggagactatatttttatgggaccatggcaggccggcggtgacgacaaaggcgtccttgacagttcaatctggaaaaacctcgatgccgtcaagcaaaaccatgtctaccgcattgatccgatcggcttctatttctcagacccgatctcacttgaaggccagctggactatattacaaaaagcttaacgaagtaaccctgaagccgctgacacagcggcttttatgattcctaaaacttgacaaaaaaatttatttatgctaaaatttacaattttggattagcgtgtataataagattctcccggccggagattgatgtgaatgacggaggattcttaatatgaaagaaaacaaggcaagtatgacttccctgctgtccgctttcggaagagcgtaccacagtaaatacggcaagccggttatgtttgatgattttctggcacaagatcttatttctgaaaaagagcattcagacatttgtgatcatttgattcaaggtatatcattcttcagcaaagacatggctcaggaacttcaagataaaccggatgatatcttaaaatgggtgattcaagtccagctgtctcctacaccgttagcgcgtgccgcgtattgtgaaaaagtgcttctgaatgaaatgatgctcggggttaaacaatatgtcatccttggggcggggctggatactttctgtttcaggcatcctgaggtaacaaatggcttagatatctttgaaatcgatcattacgcttcacaggaagacaaaataaacagattgaaacgcctggatttcgatattccgagtcatcttcattttgtaccgatggactttgccgcttcactttctttcagccgtctgtaccaagaaggtttttcccgccaaaaaacctttttcagtctgctcggcgtttcatactatcttacgaaaaagcatcttgcccgcctgcttactcaattatttgaccaagtccctccaggaagctctatcgtctttgattatgcagatcagtcgctctttgaagataaaggactgtcaaacagagtggaaaacatggtgaaaatggctgcagccagcggagagccgatgctatcgtgtttcagctatgaagaaattgaaaaggtgttagaatcatcaggtctgcttatttatgaacacttatctccagcggccgtcaatgagcgttttttcagcggacgcactgactatttaaccgctttcgagaccattcattttatacacgccgtcaaaaagtaatccgctgccgcaaacaaaaaagacatctcacagtcgtgagatgtctttttttcaaaccgattgtctgttgtttgcaaatttctttgagacgaaaggatataacagcaaaccgacgaaaaacagcccgataccgagaataaaggtcgttaaatcggccgttccggtgataatgacgtaaaaagaataaatgcaggctaagatggcgatgaaaccgtcccgcactcttgaacccttgatctcgtcatatgtttcacccgtccaaacaagcttcagactgtaaaatgctgatacgagatacggaatcagataagcgagcgtcgccgctgttgttaaaaacgtaaacgcgtcactgatcgtccgggaaataaccgaaaagataaagatttgtgacatgacgttcgtgacgattaacgacacaaccggactgccctgtttattcgtttttgcaaaagcagcgggaaagtcccctgatttcgccgcttgatacggaacttcagagccgagaagaatccagccgagcatcgttccgaacagacacaggatcgccagaatcgccatgatgatgcttcccgcattgccgacaatcgcgtacaagacgtcaacaaacggtttctccgagccgacaagcttatcatgtggaagcacgcccatcgtaatcaatgtcacgataatataaatgctgagcgcgatcaataagccggtaatggtggcgcgtttcacatcgcgctgcgaacgggcgcgcccggataaaatgaccgcagattcaattccgacgaacgcccataatgttgaaatcgccgcattgtggatctgcccgccgattccctcaactgtgtgaggcccagtttgaaccggaaaataaaaatgatcgaaaaacgacgtttgaaacacaaacaaacctgcaatgataaaaaagataaatcctaatacttttgaaaacgtcgtgacgaaatttaatttactcgcaccgttaatgctggagacgagaatcgtgtgagtgccccataataaaaccgtacatacggcaaacgtcagcagctggccgagcgtaaccgcctgaccgccgatcgaaaacatttcacgcttatccgttaaaatcgggaaaaatgatgttaaatatccggcaaggcttgtgatgatcgccacgttgctgatccagctcgccacccagtagccccacaccatcgtgaatccggctgcattccctttcttccgatcgctgaacagcgctctcgcatagctttgcggccccgccgtcagctcaggcttacggatggataagtggccgaaaacaagcgcgatcattaaaacaccggctcccgttaaaagccatgccgatgtagcgccgaacggactcgcgatttttgcgagcgtgctcggaagggaaaagatgcccgatcctaccatatttcctacgacaaatgccgtcagtaaccaaaaaccccattttttcgtctgttccattcctgtacctcctggttgttcattcgtacggaccagaccccgagaccatatttacacacaaaaaaagcctgaacaaaagtccatgcttaaagaaacacacacccttgatctccggatagccctccgcgaaaaagcacgcggcagtcctgcacttattcagatacagtcccagcataaagaaggatcggctttctttacacttcggcgctgatgcctttaacacatgttttgcggcccctgtcagcctggcatgtgcgactcatcatcaagcgcaacctctacctcaccgagaaagagtgaggatttttatcattcaattctactcagaggttatcagagataaaaagatctgtcaaagggaaaaattagacggaaaacggatagagcattcgccctacccgttttatatggtcagcggttgttttttttcttttgaacagcttcttgaagcggatcggctttcagagctgcactggcgtcgtcaagcgcaccttgaatgacgtttttgtttttatcgctgttttttcctttttctttgttaaagaaagccatctgtatcacctctttatcaaatataggtacacctataatgtgtctttttacgcggcagaatatgcggaatccgcgtctccttccttttggtgttacaggtaaagtttgttgatcaaacatgcattctcttgatatatttgtaattcaggggattttggcaaaaataaaaaggagaagcgaaaaatgacaggaaaaacacacatcatgggaggcatcgcttcttgttccgcaattgcttattactacgggtatgatccggttctgatgacctcagccggtgccatcggggcgctgattcccgatatatgccatacgaaaagcaaaatcggcaggacgctgcccgttctgtccaaaatcgtaagcacggtgttcggacacagaacatttacacacagcctgctgtttatgcttattatgtttttcatcacggcaacctacattccgaatccaagcatttccgccggactgatgatcggaatggcaagccatcttgtgcttgacgcatggaccgtcaacgggattaaactgctgtttccgtccgcgatccgcttccgtcttcccctttatatgaggacggggagcttttcggagcagcttgtgctggccggcttaacgattgtatcctgctattatttatacgaactggttcacggccgcatctcttaaacaaaaagcgtcttttcgcttttagggtgaggagtcatacatatgaagaaatcctttttcaaaaatcatcggtttttatgcttgtccattctgttcatgtggataaaaacatatgtcgtttataagctcggttttgatctgcagaacaattctgttcttgaggaatgtctgcttctcattaatccgctgagcttcattgtgccgctgttcggcatcgccctgctcctgacggaaaaaaaacagcggatctttttgctttcggcgaatgtgatattgacggggattttaatcgcaaacacggtgttttacgggttttatattgattttatcaccataccggttttgtttcaggcgagcaatatgggcgatatgggaagcagcgtccaagagctgtttcacccgctttatatcgctttattcttggatattgcggttctgttttatcttgcgaaaagggatacagccggtaagggaaaagcaggcgcacgaaccgttaaagcgtatgcgtgggcatcagccggcctcatgctgtgcaaccttgcgctgtctgaggccgagcagccgaagctgttcaagcatccttttgatcgtgaagcgctcgtaaaaggaatcggcctgttccactttcatttgtatgacaccatttcgcagacgctgaatgcaggggctaaagcgtttgcagatgaagacagccttgcggcggtggcgaattacactcaagccgactacagcagcccgtccgattcaaagttcgggcttgcaaaggggcgcaatgtgatttttgtgacgctcgaatcaacacagcgttttgtgatggacgaacgggtcaacgggcgggagattaccccgtttatgaataagctgcggaaaaaaagttatgatttcactcatttttatcagcagaccgaacagggtaaaacctcagattcagaattcatcaccgcgaattcgctgtacccgtcttccagcggcgccgttttttttacaaaaagcggccaccggttcaatacgatgtaccatacgttaaaagaccatcaatactattcagccgttctgcatgccaaccataaggccttttggaaccgggatgagatgtacggcgccttcggaatcgaccgtttttttgacgccgatgaatttcaggtgacacaggaaaattcaacgggctggggcctgaaggacaaagagtttctcgagcagtcagcggaaaaattaaagaagctgccgcagccgttttacgcaagcctgctgaccttgaccaaccattttccttttgaaattgaaaaacaagatcagctcattgatgaaccggacacaagcagcgatttattaaaccgctatgtgacaacggtccgctatgaagatgaggccttaaaacactttttcaagaagctgaaaaaagcaggactgtatgacaactcgatgatcgtcctgatgggagatcattacggcatatccgaagcccataataaaggacttgccgagttcttaggaaaagaggaaatcactccgtttgatacggttcagctccagcgcgtgccgtttatcattcatattcccggggtgaccgaccgtgcgccggaaacggttgcttccgctgcgggacaggttgatgtaaaaccgacgctgcttcaccttctcggcattgaaacgaaaggcagcattcagttcggcaatgatctgttttccaaagagcggactccgtttgctgtactgagaaacggcagctttatcacggacgatcatatctatacgaaaaatacgtgttacagccgcaaaacgggcgaaccgctttctgacgtgagcgcgtgcagtgatgagaaagaaaaagcggaacaagagctgatgctctccgataaaatattaaacggcgacctgctgcggttttataagcaataaaaaaatccctccgttttatggaggggttttttatgtttcatatatcagccgtccggtcattttcgtatcatatccggataattgagaaagctgagacttgaattcctcggaattgagaatgtcccgcacgctttgaacaagctccgggttttgttttaagacgacaacatcgtactgctcactgatcaccgggataaaatccgtgcctgccatatgcgccgcatgctgcgacccgactcctatatccgcttttccgccggatacttgtgaagccgctgacagatgatccgtgacaatgtcatggtagccggcgacatcagacggcgtgatgccgaatgatctgagctgttcatccagcagcaccctcgcgcctgatcctttttcgcgattgacgatgcggacgtcctttctgctcacgtcctgaaagccctgaatgttcagcggattgccttttttcacatataatccggcctgccgaagcacgacatgaaaaagcgcaaacggctctcctgaaagaatgcgcttcacatacggaatgttatactgccccgtctccccatcgtacaaatgaagactgacgatatcgcaagccccccggtacatctcgatcaggctgtttaaactgccgctgtacttgcgaagcggagccgcctgtatcgttcgttccagctgtttgctgaggaggtccatcgacacatcctgcccgctgatgataacggactcccttttttccgggtcccgcctgcggggcgagtcagccgcatcggctgcggatggcttttttgacatcctcatgtttgctttatattgttttaagtcttcttcatcgactctcatctgtctcccgaccttgtacgcaggaatgagccctttttttatcaaatcatataccgtcagttttgagaccttcaaaaggcccgcaacttcttctattgtataggaagtggcttctgccataatatcacgctccgtttttattataactgttaagttattgaaaaaaaaccgcaccacaacgtacaattacgttataattagtatgatctaatgatatttagctataaggggtgcaccattttgaaaaagaaagcgacactaatcacaactgcggccatggccgttttcctggcaacggcgggctgctcatccgggcaatcgtccaaaggcggacaaaacgaaaaagtgacgctgaccgtttccgcggctgccagcgctcaggatgcgcttgaagaaatccaaaccaactatgaaaagtcccattcaaacgtgaccattcaagacaacttcggatcatcgggcacattgcaaaaacaaatctcacaaggcgcgggagctgatttattcttctcggcagccgaagataaattccaaaagctcgttgatgacggagatatcgacaaaaaggacagcacggatcttttgaaaaacgacctcgtcatgatcgtgcctgagaaaaacagcgcacaccttacacatctgaatgacctgaaaaaagacagtacagataaaatcgcgctcggcacgcctgaatccgttccggccggacaatacgccaaacagtcattgacgaaattagacctatgggacaaggtaaaagataaagtcgtctatgcaaaagacgtccgccaggtgctttcttatgttgaaaccggaaatgttgatgccgggcttgtctataaaacagacgcgctgatttcaaagaaggtgaaaatcaccgatgaagcgcctgcgaaaacccacgatccgatcgtgtatccgctcggcatcgtcaaggatacaaagcaccgtaaagaagcggaagcgttttatcagtatctgcagtcagatgaagcgatgaaagtgtttaagaaatatggatttactgccaagtaatattacggcttcggagtttttcactcccgtcgtactgtcttttgaggtggctttggcatcgggcatcgccgtcatcattctcgggacgctcgccggcgcctggatggcgaaagcgagatttcccggaaaaacggccgtggaaaccctgtttatgctcccgctcgttcttcctcctaccgttgtcggtttcattctgattatcattttcgggaaacacagcgttatcggccgggcgattgaacaggtttttcaccagtccgtcatcttcacgtggtgggccgcggtgatcgcttcggccatcgtcgctttcccgcttatgtatcagtccgccaaaacgggtttcgccgcggttgattctgacatcgagggggcggcgaaagtagacggggccggcagatggcaggtatttacccgcatttccgtgccgcttgcctttccctccctcttgaccggaagcattctcagtatcgcaagagcgctcggtgaattcggggcgactttaatgtttgcgggaaatatcccgggcgtcacccaaacgctgccgacagcgatttacgtcgcgatggattccggcaatgaaacactcgcctgggtatgggtgatctgtattatgatcatttcttttctgatgctgtttttcatccaattgaaaaaaccagcttgaccatccgccttccgcgcagatttcgccgggaggctttttgatttaaaatcggatggtatataatgaaacaaaaacacacaaagggtgcggctatgaagattaatgtcattatcgcggatgataattctttcatcagagaaggaatgaaaatcattttgcatacatatgaggaatttactgtatcggcaactttggaaaacggacttgaggcggcagagtattgtaaaaacaatcccgtcgatatcgccttattggacgtccgcatgccggtaatgaacggcgtcgaagccgcaaagcggatcgcggaggaaacggatacgaagccgatgatcctgacgacatttgacgacgatgagtatattttagaagcgattaaaaacggcgcgaaaggatatttattaaaaaataccgaaccggaacggatccgcgatgcgatcaaaagcgtcttcaacgggcacagcatccttcaggacaccgtgctggataaaataaaagacagccttttccgtccggcggaagcagcgcatcagattgatgaaagccagtttactgaaagagagctcagcatcatgtcgctcattgcgaaagggttctcaaacagggaaatttcaaaacagcttttcatttctgaagggacgacggccaattatatttcatctattttagggaaaacgggacttgagcacagaacgcagatcgcgatttattatattaccgggaaggtggataacgggcgttgaacggtatggatttctggatgctgataagcagactgatcgtcattttttacacggcctttttgttcgtatcggcagaccgcctttacacgccgtacgccgtcttgtttctgctgctttatctgtctttgggcattgcggtctgcatgatcaggccgcccgcctggagacgcggaatcaccctgctcgcgctggcattgaccgtctggctttccgtacggggccatccggcgtttctgtttcttttgccgcccgccattttcgccgtccttgccgaatacccggttcaccgctatatgttctgcctgtttgtgtttttgccgtttttatttattccgtacggcgatcttcccgcctataccgtcataaccctgttctgcctggcgattttcgtattggccgcccggtcaaacgatcggctgaagaaatatgaggagcagtcagacagtatgcggtcgagcatcgaaaagctgacgaaacagctgcacagcagcaccgaatacatcaaacaatcggagtacaccggcaaactcgaagaaagaaacagattgtcccaggccatccatgacaaaatcggccattccatgaccggcgcgctcattcagatggaagcggcaaagcggatgctcagctcccatcctgaaaaagcggcagacctgcttcaaaacgccattaccatttctaaagaaggcatagaggatatccggattacgctgaaaaatatgaaaccgcccgctgaacaaatgggcattcacagattaagaacatttattgatgaattttcggccaaaaacggcctgccggttccgtttacgtacagaggtgatttggacaggctgacgcaaatgcattggagagtcattcaggaaaacgtaaccgaagccctgaccaacacgatgaaatacgccgatgccacgcagatctccattgatattcacgttttgaataaagccgtgaaagcggaagtgaaagataacggaaacggcgccgtccgctttaaaaaaggcctcgggatgctcggtatggaagaacgggccgccgttctccgcggaaccgtcatttttgacggcacggcgggtttttccgtcacaaccttgctgccgattgaataagtgaatgttttcatgtgaaaaatatgaagattctcatgtcaaaggaatgaacagctgcactaacggccgttcattcttttttttataataagagcatcataagacatagaggtggaaacatgaacattttggagctcaaacagctgagtaagaaattcggcgattacgccgccgttgaccagatgtcacttgccgtaaaagaaggtgagattttcgggtttctcggcgcaaacggagccggaaaaagcacaaccatcaacatgatttcaggccttttaaaaccctcagacggagacattttgtttctcggcaaagatattttcaagcacagcaaagcaacgaaaatgaatatcggcatcgtcccgcaggacctcgccatttatgaagaattaaacgcctatgaaaatgtgaaattcttcgccgggttatacggcctgagaggggcggctctgaaagaacgggtcgaggaagcactgacattcgtcggtttgagcgataaacacaaatatttgccgaagcatttttccggcggaatgaaacgccggctcaatattgcctgcgcccttgcccatcggccgaaactgatcatcatggatgaaccgacggtcggcattgacccgcaatcaagaaattatattctgcaatcagtgaaaaaactgaatgaaatgggctgcacgatcatctatacgagccattacatggaggaagttgaagaaatatgcacgcgcatcgctatcattgaccacggaaaagtcatcgcggaaggcacaaaggaacagctgacctccatcattaccgacacaaaagatgtcgtgattgagctgtcatccggaaacggcatcagtctcggcgatattcaggagattcccggcgtcagagccgcggcactggaagaaaacagcgtaaaaatcagctctgacacaggggtcaacaatttaaaccgcctgatccgatacttcatggacaaaggaattgagatccgctccttacaggaacaggcccctgacttagaaacggtatttctcactctgacaggcagaagcctgcgcgactgaccaaactgaaaggaggattgcaaatgcgtattctgcacatcgccgggaaagaaatcaaaatcagtttccgtgacagacggacctttattttcatgcttgcttttccgatcgtctttatgctgattttcactgcggcattatcaaacgcctttgactcagaggtgacggtcgggaacatcaaggtggtttatacggaccagtcaaacggccctctttctcattattttactgagtttatgaaagcggccaaaaaagagcatgtctattttcaaaaagcggacactgaggcaaaaggcaaaaacgatgttcgtgaaaatcaggcggatgctttcgtcactgtaaaaaacagcggttttcaagtctatacaaatgaccggagcggcatgaacggcacgatcgtccaaggcatgctgaccgcttttaccaaccaatacaaagcaggcgccgccgcttacaaggcacataaggcacctgccgccggcgaaataaaaagtgattatattaagcagacgtctttaaacaaagcgaaagaaccgaaagcgaaagatttttacgcggtttccatgacgacaatgatcgggctgtacgcctcaatttttgcaagcaccttgttccgcggggaacgaatacggcacactgcggatcgcctgatcgccgcgcccctttcgaaaagcgatatctttcttggaaaaatgctcggcattttggctgtgaactttctgacgatccttgccgttgtcgccttcagcaaatttatcttaaaagcgaattggggcagccatatgggacttgtgcttttgattctcgtctctgaaattcttttggccgtcagcttcggtctcagcatgagctatttgaccagaaaacccgaaagcgccagattaatcactgtcatcatcgttcaggtgatggccattatcggcggcgcctattataaatatgaagacggaggaatttccgtcctgtcgccattaacttggatcaataaggcgattaataaaattatatacgccaatgacgtatcagccgcctggcctgcaattggtttaaatacagcattagcggcgctctttttgctgatcgccgcggttacgtttcaaagacgggagggactgtaatatgaaaaacttctggtggctgtttacacatgctctcaaagggattacaaaaagcaaaaaacagctcatcctttatatcggcgcaccgctgatcggcgtctttctctccttcatgaccaatgccaatggcggagccgaaacgctcaatatcggcattctcaaccaagacggaggagaagtgtcccaggatacggtatcgtttttaaaagggctggatcatgtgaggatttcggaggaaacggctgcgtctgcctcatcaaagatcgcgtcagggaaaatggaggcgctgattacgtttgaaaaaggcttttcgcaaagcgtaaaagacgggagaccgtctcatatcggcatgacctcgctgaaaggcgcccaggtcaccgggtatgtcagctcttatctgtacaattatattaacagcgccgcctcaatcggcaaatcttccggcggagacgcgaaagcttttcaggcgatgtacgccgatttcaagcattctcccattcaaacggaatccgctgttttacaagatacatcgaaccataaagaaatgacttactcagtcattggatatctcatcattattatgctctattccgccggcaacctgacagaactgatgattaaagagagagaaaacagaacgtactacaggctgctgtcaacgccgatcacgtcaaaacagtatgtattggcgaacgcggcggtgaatatgattatcatggccgtccaaattatattcgccgttctctttatgggcgcagcttttcatattcagccgtcattcccgctgtggcagctgttcgccctgatgatgctgtttgccttaagcgcgatcgggatcgcctttattaccgtcggtttttccaacagcagcgcttcggcgtcggcgcttttgaatttaatcgtcgtaccgacatgtttgctggcaggctgcttctttcccggcaatattatgccgaaaacggtgcagacaatcgccgaatttctgcctcagcattgggtgctcgatacggtggatcaactgcagcacggccgttcgctccaaagcctgacactgaatatcactattttaggagccttcgccgccgcctttttattaattgccgcatacaggttcagtgtaaaacggcagtcacagacatttatgtaaaagaaaaacagccccgtaaagggctgttttttcttagaacagaagctcgtccggattcgggccgacacgctcgtctttgtttaatgcgctgatattttccatttcttcctgtgacagttcgaaatcaaaaatatcggcattttctataatgcggtgctctttaatggatttcggaattgtaacgacttcgttttgaagatcccagcgcaaaatcacttgagcaaccgatttgttatgtttttccgcaatttgtgacagcacatcgttatccaagagctgtccctgcatcaatggagaccatgcttccacttgaatgccctgcgctttgcagaaatctcttacttctttttgagtcaggcgcggatggaattcaatctggttgaccatcggcttgatttcagcatctttcagcagttcctctaaatgatgcacttggaagttgctgacgccgattgcgcggattttgccgtctttgtacagcttttcaagagcacgccatgtgtctttatatttatccttgccgggccaatgaatcaaataaagatcgaggtaatcgaggccgaggcgctcaaggcttttctcaaatgcgtcaagtgtcgtttcgtatccttgatcttcattccacacttttgacgtgatgaacagctcttctctggcaacgcctgcagctctgatgccttcgccgacaccttcttcatttttgtaaatagccgccgtatcaatgctgcggtagccgtttctgatagccgcttcgacagcgtttgccgctacgcttccgttttccaccttgaacacgccaaggccgaaccacggcatttcaacgccattatgaagctttacagtatcttttaagctttttgccacgttgaaccatcctttctagtctttatgtaaacggttattattatctcatatttccgcagtaagaaaccaattatacgctcaacgttctaacagaaaccatctttagtccccaagtaccactaacgttattattttcctatttttgaataattaaggttaaatgggtaactgtccgggtaaatggctactgtagccaccaaacaattgaaggaggaaatattatgaaacgtatgcgtatccctatgtccgttgcccttggcgccgctttgtctctgactcctctgtcctttgtatccgcaaaagaaaacccggtccctcaaaacatggcacagcaaacatcagatgtctcagcaaaagatgtaggattaaatattgacgttgacctgctcggaatcggcaatcaaattgctgacgcgattaagtccgcaaaaaaccgtgacggcttcgtcaaaaatttaatggaatcttcattctactcttccggacaaaaatataacgtcatggtgtttaatttaagccaggaatatgaagatcattttaacggcgttcagttttacggttcggccgtttatgacggcattacgtacggcatttgggtgtttgaagacggaagcttcaccaataaaggcgatggaggctggatcaactgggccttcagaggctggtttgaccgcgacggcaatcacgtcgaattccatcgcccgtaatataaaaaagtccggcgcacatacgccggacttttttcatttattcatctccgtcaagcatggccgcttcaacatcattgatgtattggcgaagctcatgcgacatgtcgcgggaaatctcccgttcttcgaataatgtttggatttcgttgcggatggcctgcacggcccgcagtttgatttcgagcttttgattttcaaaacggcggctcggactctgttcgtgatacgagtgctccagcctgaaaatcaagtgattgtaaaaggaaatgacggcaagcgtcacgtctttattttcttcggtcatgtgttttttcaggctttcaatagccgcttttgccgttttaacccttgtggcacgaataaggccttcttcatttaaaatcgacatttccggctttttatgttcgccgaaaaagatccagtacatcagccgtttcagctttttcttagacaagccgactttaaacggattggtataaagcacttccagctcatcgaaccgttcctgtaggctgtcagccgtttcttccggtatgtcgccccgctcaatcagccgcagcagttcttcctgttcagcctgtatcccttgggcgcgaaccttccgctcatcttttttcgtgcggttttttaccgtgaactgctggaacctgagatttttcattttctcattgtactcggcaatgaccgcaaaagaagccgttttgtttgtctcattcatattttctttaatggctgttaaggcagcctttatcagcttccgtctcgctgtcagcaatttgactttcttttctttcacattgtcttccggcttttcagtcagaatcggcagtacgattgtcgccagcaccaatgtgcacaaaataacgcccgcggctaaaaagagaatcaaattccgttcaggaaacggcgagccgtcggagatcacgtacggaatggaaaaggaacccgcaagcgtgaccgctcccctgacgcctgaaactgaaatcagcagggtggagcgcaagccgggcttataaatgctctggtccttgttaaaaaaccacttcccgttccaaaaaaacagcacccacaaaaacctgagaatcattaacgtcagcgtaatgacgataatgtacccgatgaccatcatattgttaaacgcggtgtcattaaaaatgacagaaaccacatcgggtatttgcgttcctaaaataacgaaaacaagaccgttaagaatgaacaaaataatattccacgtacttgaagagacgatttgcagtttgaccatcgttgattccagacgatcctgctccaccgcatgcgtgatgccgccggccacaaccgctaaaatgccggaaacgccgatttcttcagccgccagatagatgacaaacggcgtcagaatttgaatgagcatatgcatcgtgacatcctgcatgccgaggcggcgcaaaaataaccggaaacggataatcaaaaaagaaatgacgacaccgctgagtaaacctccggctgaaatcagaacgaagctgaacgcggcctgcgccagcgaaaatgcccccgtcacggcagccgcaatcgcaaatttaaaagcgaccaggccggatgcgtcattcatcagcccttctccttcaaggagacggagaatgccttttggcatcttcacacgtcctgacagagcactcaccgcaacaacgtcagtcggtgacagaatcgccgcgagcccaaacgcggcggccagcggaatacccggaatcatccaatgaatggtgtaaccgccgacaatcaccgtggcaaacacgagcccgagcgcaagaagcagaatcggcgctcttaaattccaaagttccgcacgcggcgttcgttttccatcgttaaaaagcagcggagcaataaacaaaacaaaaaacaattcggtattcagttcaaaatgaagcccctgcggaaatgacgccgcaatgataccgagcgccacctgaatcagaggcaccgggataaaggggacaaaccgatttataatatttgagatcgcaatgatggttaaaagtacgagtacgactaaaaatatgtccaaagcatgacctccttcatctgctgcattgtatcattattgcctgttctcttccttgatcaaaggccgaagccaatcatcgggcaggcctgatatattttccgcacacaaccagtcttcttttattttacccgtttttatttaaaatttctcataacgtgctcacagcgaacttttttcctatgtctatattttttcacaaaagaaaaaagcttgttttctgtgaaaacaagcttttcgcaggctgcattcttgtcagcagctctattttattcgtgaaaattcgttccgtctgttgtcgctttaatgatgcccgcgcggatgacgaaatctccgaagtgttcgccttcctccctctctttcgcgtagcgcggcagaatggtgcgaagctcactcagaatttcctcttcaccgatattttcccggtacattttgcttaaacggctgccgtcaaacgccgcccctaaatacatattatattttcccggcgcctttccgataaaaccgatttcgccgagcgcatggcgggcgcagccattcgggcatcctgtcatacggatggtgatttcttcatcccgcagcccgttttcgtcaacaatttcttcaattttatcaatcagcttcggcagataccgctccgcttcggccatggcgagcccgcatgtcggaagcgcgacgcaagccattgaactgcggcgcagggcggaatgctgccggccgtctgtcaggccgtattgttcgattaattcgctgatttgttgctttttctggctcgagacattgccgataatcaggttttgattagaggtgagacggaaatcccccgtatggactttggcgatttcacgcattcccgtcatcagcttgtaatcctcatagtccgtgacacggccgccttcgataaacatcgtaaagtgccattttccttttacgcccttcacccatccgtaacggtcgccgttatggtcaaaatgataaggtttcgcttcatccagctgccagccgaggcggttttccagctcgttttttacgttgttaagcccgagacggtcaacggtatatttgaatctggcattctttctgacggaacggtttccgtaatcacgctgaatcgtaataactttttccgctatatcatacagctgctccggcttgcagaagccgataacttttgaaagctgcggataagtggccgtatcgccgtgcgtcattcccatcccgccgccgatcgctacattaaagccgataagcttgccttcttctacaatggcaatgaagccaagatcttgagaaaagacatcgatatcattggacggaggcacggcgattccgattttgaatttccgcggcagatacagcggcccgtacatcggttccgtttccgtgtcaggagtgcccgccacacgttcttcatcaagccagatttcatgataggctctcgtgcgcggaagaaggtcgtcgctcagttttttcgaccattcgtatacttcggcatgaatttccgactgatacggatttgaagcgcacatgacgtttcggttgacatctccgcaggccgcaatggtatcaagcagcgccgcattgattttctgaatcgtttttttcatgttccattttaaaattccgtgcatttggaatgtttcacgggttgtcagctttaatgtttgatttccgtatttttgcgccagttcatccatgacaagccattgttccggagttgaaacgccgccgggcatccggacgcgcagcatgaactgatacgccggttcaagcttttgtttctggcgttcattgcggaggtcgcggtcatcctgcaagtagcttccgtgatgcttcatcagccggttgtcatcgtccgggatgccggctgaaatccggtcaagcatgacttctttcaatgtgccgcgcaaataatcacttttttctttaatatcctcaacatcacttggagggccttccggcgcttttaaaatgttgttcaccatgctgaataagctcctttcaaaccaaaatcaatatacgtcacgctgatagcgttttttctgctgcatgtctgtcaggaagctttccgctttttcacggctcatgccgccttcttcctgaataatatcgagaagcgcctggtgcacgtcatgcgccatatgctgttcatcaccgcagatgtatacagcggctccctgctgcagccattcatacagctctttgctttgttctttcatgcggtgctgcacatatactttttcctccgaatcccgggaaaaagcgacgtccatttttgtgagaacaccgttttgcagccatttttgccattccgtctgatacagaaaatcagtgacaaagtgctgatctccgaaaaacagccatgttttcccttcggctccggtttcttcacgctcctgcataaaggaacggaaaggcgcgatgcctgtccccggcccgaccataatgatcggtgtatccggattttccggcagcttgaagttttggttatgctgaatgtaaatcggaagcgtatctcccggctggagccgttctgcacacagaatgctgcagacgccttttcgttccctgccgtgcgcgtcatatctgaccgctccgattgtcagatgcacttcttccggattcgcttctaaactgcttgcgatcgaatagagccgggccggcattttacgcaggatggaaagaaagtcttccgcggacgcttcccacgggccgaaatcacggacgagatcaagcaggtcacggccattgatgtacgctttcacctgctcttcgttcccttcggccagaagttcactcagctttttgtcagccgtaaactgtgcggccttttgcaggagcggttttgtcaggacggtgatttcaaaatgagaagtcagcgcgtctttcagcggacggagctctccttgtttattcaccgccacttcctgtttcgggtcccatttcagctcattgatcagctcatcaacgagcgccggatcattttcgggatagatgccgaggctgtctccgggctgatacgcgagacccgagccttcaagcgaaagctcgagatggcgcgtttctttattcgaaccgcgtccgttcagattgatgttctcaagaacctcagcccgaaacggatttgttctggaataaacggattcaccgagagcgtgcgtttcggcaggcgcttcggctgtttggtttccggctccttcgttcaaaccgccgatgacagcgtcaagccattccgaaaacggctcatcataatcgagatcgcaatcaacccggggcgcaagctgcgtgccgccgagctcttgaagacgctcatcaaattctttgcctgtttggcagaaaaattcatacgagctgtctccgagcgccaaaacggaaaaacggagcgcttcaagcttcggcgcgcgtctgccgtgaagaaattcatgaaaagccagcgcattatccggcggatctccttctccgtgcgtacttaccacgatcagtaaattgtttatttttttcagactattcggcttaaaatcgttcatcgacgcgatggtgacctggaatccccgttcctcaagcgtctttactgtctgtttcgcaagaccttccgcattccccgtttgtgacccgtataagacggtcacctctcttgagactgccgggctttctgccggaacctggggagcgggtgcggctgtttcaccggactcggaccgggccgcagccaagtaaccgctcagccagattttctgtgattctgtcaaggtcggcagaaggcggttaaggagctctgcctgctcctgattaaacggactgttcatgacctgaagttgcaacgatatccacctcacaaggaattaaacgtaacgtacgttatttctataggaattgtcaaaataatattctaattgaaactttaccgaaaatttgtatgtaagtaaaatatataatcgtgatgataatgattaagattactaatgataaaaagccctttgcactcggcaaagggcttacacgaataagccggcgggcacttcttttataaaaggagaagtttctccgggagacagcacggtcagatgatgcatcgcccgcgtgcaggccgtatataacagcttgcggtcatgctggctattgtactgggtaacagaggcgtcagcaacaatgacggcgtcaaactcaatgccttttgccaaatacacgggaatgacgcatacccctttttggaaaggctgattttctttattgatcaaacggacatcgcttgcgacgctgaccgcctgaaatactttttttgcttccgcggcagttttgcagatgacggcgatcgtctcccagcctttttgcctgagctcccgtattgtttccgtcaattgctcctgccgcgctttttctgtatccgcccgcaggagacgcggtttttctccgttccggttaaaaggctcaatgtcatcaccgtcatcgagcagcgctttcgtaaattcaacaatctgccgcgtcgacctgtaagtccgcttcaggctgacatacttttctgcgccgttgcgaaagcagccggcaagtgaagaagggcccgtgatggtgtgggcataaatcgactggctgacatcaccgagcaccgtcatcttcgcggctgggaagatgttttgaatatacgtcagctgaaatggggaataatcctgcgcttcatcaatgaatacgtgcttcatttgtgtgttttttctttttccttctattagatcctgcaaataaagatacggagctgcatcttcatatgggagtgactgctctgcgaacgctttccgggtcaaagcgccgatgctctgccattgatcaggcgtttcatatgatccccagtctgaaaacagccggagatacatccgttttatatcgagaaagccaagctgtctgacggcctgcttaatcggcttaaaagcttttcccacaatgatggcgccaagcagccgctgttcgcgctgatggtcgtcaaaagcaggttcatcatccgccgcttgcttcttgagtttttgataaacctgagcatagtcttccttatcgagcagctcactctcctgcagaacccattccttcttacgttcctttttttcgagtgcgctgatttccgcaagaagccattccgccgtcagctccgctctgttcggaatcggcagctgctgatcaagtgagtaaaagtaatcttcaatccgctcttttgaaatcagtatttctccccggaagctgatctgtttacacatcaggccggagacggaaagcgatccggcgtaacggtcaatcatggtccggaaagctgatgacgctttgtaggcgatggctgtgagccttacggaaagcgcgtcctgattttgctcagtcaggcaatattcgagctgctcgtacgggctttcacaatcaaactttcgtccgagccggcgggcgatatattcctgaaaggtggcctgctccatattctcttctcccagttccggcaatacggcggaaacgtaactgttgaacaaaatgttcggagaaaacagcacaatctgacgggcatcaagcacaccgcgcccccggtacagcaaataagcggcccgctgaagcgccgcggatgttttcccgcttccggcggctccctgaacgatgagatatttacttttttcatcccggatgatttcattttgttctttttgaatggttgacacgatatttttcatatgccggccggaattttcgctcagcacctcttgcagcatttcgtcaccaatcgtcatatccgtgttgaacatcgctttaagcgtcccgtttttaatgataaactgccgcttcagtgtgatgtcgccttctatggtttcttccggaacttcgtagcgggcttttcccggggaatattgataataaagagatgagatgggcgcccgccaatcgtaaatgagaaattgatcattgttttcgtccatcaaagaagtcagcccgatataaatccgctcggaagaagattcccctttttccgtaaaatcgacacggccgaagtagggagaggctttcagcttttggattttttgaagctgccgatattgaagccgatgcgtccgttcacgctctgaaagcatttccgcctgctgtttgatgcttgaaaatgtttccgccgcttcatgggcgtcatccaaattcacggtgacatcattccagaacgtttttcgcaggccgacaatatcctgcttcaatccgcccgatgatgcttcaagacgcgtttctttctgatccagttctttcattacaaaattgattcgtccctgctcttctttccattcttcatcacgttttgccatcagcggcacctccgacatcaagctgacaaattcggctcatcacacaaacatatatgcaacataatattcagcattatagtcaaatactctttttcttatcttatcgggcgtcttttttttcagaagccgttatgcaaaaaaaccgatttcttttatgaaatcggttttttactgatctatatgataggaacgattcggcagacgccacctgaaaacataactgcagatgcggcatgccacaagcacaaggaacagcacatacaagcctgtggcattcccggcccagccgaggcccacgattaatcctccgagcgcggcccagactgcataaatttccgacttgagcacaaggggcttcctgcccgcgagcagatcccgtatgatgccgcctccgcttccggtcagcaccgcagccgcaaccaccgcactgaggggatggcccattttcacggcatataaagcgccttggatggcaaacgccgaaagcccgatggcatcggatacgtttccccatttactccaatgtcttaacagcagcttcggaaacaaaaagacaatcgtaactgatgcgagagcgatttgaaaaaacgcgccttgctcccacaaggcggagactggaacaccgatcagcagatttcggatggctcctccgccgaacgccgttacaatccccaagatatacacgcctaaaatatcatactcctcttccatcgcaacaatcgctccgctgaccgcaaacgcaatgatgccgattacactaagcagctcccaggccattccatatgctcctttttatttgttaaattttctgacgaccattagattttataatcgctttctcttaaaatcaaccttatttttgaaagattctgattccgaaaccgggacaatcgcctccgtagctgccggaagcgagaattttttcctattttatactatattaggaggtttattggaagtttcattgaatacctactctaacataaagggggttataagatgaaaatcagttcacttgtttttcctgttttattggccgccggattaattcccggcctgccgtcagccgaaagccacacgcattcgcacactcatgcggagccggccaaaacggtgtatacggacccgcttccgaaagctgatcattttaaagatctgaaaggcccggttcagattgaacagacggttgatacaaaaattttggatgaaaacggtaagcaggtcggcacaaaacgcttcaacgccaatgtcaatcaggagaaagcctcgactaaagcaagcacgggcagccagaaggtcagagtgctggcggtggcggacgctgaataccgcgctaaatacagcgactggcaaacaagaatcgtccagatcgtggagcaggctgatgtcgccttcaaccgtgatcacaacattgatttcgtcgtacaggccgtgcaggcttggaattcctccggctcaaacagttctcaaattttatcgaatctccaaagcagcttcagtaatcaaaattatcattttgtcgtcggttttaccgcaaaatcaagttttgacgccggcggcatcgcatatgtatataacggcaaaccgagcggccccgctttcagcgtgaaccttgaccaaggtacggccaacacggcgaaagcggcccagcacgagttttcccataatttcggacttcagcatgacgcccaaggcagcggtatccgctgcgtcatgaattatgactatgcctactccgtggatatttgggacagctcccacaacagacagattgagacaaacaaagcttggtacaaataatagaaaaagagccgctcccatggagcaggctctttattttgccgtgcgttccgttttgacaaagcacatgcagataatgatgagaataaatgccgtcaatgctaaaaaaggaatggtaatgaaaccgaaccagttaatatattcagatgagcaaggaacgccgtagacgcacggcttgatgccgctgaaaccgggcaccttctgctcaaggtaatgcattgtcgatataaacgcgccgatgaccgccatcggcagcacatattttttcacgcgcgtgtcaccctggaaggtggcgattcctaaaatcaggacaagcgggtacatgagaattctttgataccagcacagctcgcacggtatgaattttctgatctcgctgaaataaaggctgccgagcatggcaacaagagctattacccaagaagcatataaaaatacgattctatttttcatttttcagctctttcttaatcgtttttgaaatctccttataatcagagaagtttttaatcaatttgtcatttacgtaaatcgtcggtgtcgccgtaatgtttaatttatcattcaggtcagtgtcagctttcagctcttttgagaaggtttctttatcaaggttttccttcagcttgtcaggatcaacctttttggcggtgcttttgaccgttttttcaagcaatgcaggcgtgacccattcctgttcgcttgacggctgctgttcaaacagcttctcatggaatgcccagaatgatgccgggtcttccttccacacctcttctgaagcaagagccgccagacgcgatccgcttccgtggaacatcacgttcacaaaggaaaatttcacgtcgcctttatcgataaaatcttttttgattttcggaaaaatatcgctgttaaatactttgcatgaaggacatttgtaatctccgaattcaactaccgtaacaggcgcgctgtctttgccgagcacgggctgtcctttaatggaaggctgttcggcgactgtttcgcccgctttttccgattggttgttaataattacgatggccgcaaataaaacgacaacgattaacgtcaggatcaccgcaaatttcgcagacgattgtttctttttcactcagacacctcattgtttttaaaataaaaaagaagcggatgccggatggcccgcttctctattttaccaagacaaccttctttaagaaaaccctgaaaaacgaattatccttgacaattattccgctttcaccctcatgacacgcattgcgttggcaacggcaatcagcgtgaccccgacatctgagaagaccgcttcccacatggtggcgaatccgagtgcgccaagcaggagaaaaattatttttacgcctaatgcaaagccgatgttctgccagacgatccggcgtgtgcggcgtgcaatccggatggcttcggctgcttttgacggctggtctgtcatcaggacgacatcggctgcttcgacggcggcatcagagccgagagcccccatggctgctccgatgtcagctctggcaagcacaggcgtatcatttatcccgtcaccgacaaacatcaatttttcattcggtgaaagcgccgcttcgagttcttcgacgcggtctactttgtcacccggcaatagctctgtatacacgtcatcaataccgagctcgcggccgaccgcttcaccggtctgctttgaatcacccgtcagcataattgtccgtttgacaccgagcgcttttaaagaggcaatggcctgtttggcgtcctctttgatttcatcagcgatcacgattgcccccgcatattgcccatcgacggcaacatagacgacggttcccttgttttcagctgtgccgaaagcgatttgttctttttccatcagtttttgatttccggccaaaatggttgatctgccggttttcacccgaataccgtgtccgggtatttcttcatattcttcaatttcctgagccgcaagcggtttattgtaagcctcacggatggatgcagcaatcggatgattggaatggacttctgcaagcgcggccgcatgaagcaggctgtctttcgtaaaccctgccgccggtttgatatcagtaacggcgaaattgcctttcgtcaaggttcccgttttatcaaacaccgcgtatgccacatgattaagtgcttctaaatagttgcttcctttcacgagcactcccgcttttgacgcggcaccgataccgccgaaaaaaccaagcggaatggagacgactagtgcgcatggacaagaaatcacaaggaaaatcagcgcccggtacacccagtcagaaagcgcggctgacggtacgagaagcggcggcaaaaaggcgagaagcaccgcaacaatcacaacggccggcgtataatatttagcaaactttgtaataaagttttccgttttcgctttacggccggccgcattttcgaccagatccaatatttttgatacggccgagtcttcatatcctttagcggtttcaatatgaagcacgccgttctggttcataaatccggccattacatcttgccccggctccgcttttctcggcacggattcacccgttaaagcggatgtatcaaccattgatgaaccgctcagcaccttaccgtccaacggaatccgttctccgggattaacgacgatgacctgtccgactttgacgtcctgcggcggaactgccgtcatgccgccttccgttttcacattggcgtactcaggacgaatgtccaataacgcgctgatcgattttctggatcggctgacggccgctccctgaaacaattcaccgatttggtagaacagcatgaccgcgacgccttccggatactgatgaataataaatgcgccgattgtggcaagcgccatgagaaaatgctcatcaaatacctgtccgcggacaatattttttcccgctctggctacgatatcgccgccgatgatcaaatacgaagcaaaaaagagcaaaaactcaaggacggtccccgcgtgcgcgaaataagcgattatgcccaaaacggcgcccgccgcaagccttactaacatcagctgcagctttttgcggtattcatccccgccgggtttgtcttcatgctttgaacggacgttcacatgaggatcaatggactttacctttttcgcaacttcgtctttcatccactgttcgtctttgcccccggccgaaaccgtgatggtgcttgccgcaaaattgacagcacaaccgtctatgccttcaatggcttttacgccgttttctattttttttgcacagttgctgcaatcaagtccgtctaacacaaattcacctttggctgctttcatttcgactcaccctaccttccgtaataggattcccataacatcaatacagctaaacaaattatatatatgagcatatgttcatataagtgttttctatattatatgcaggttttgaataaagtgtcaataaaaaaacaaaacaggcctcagcccattttgtcttttttcaccttctgtaaacgcaaagcattaaggacgaccgataccgagctgaacgccatggcagcgcctgccacccacggggctaaaaagccggatgccgcaatcggaatgccgatgctgttgtagcccaatgcccatcctaaattctgcttgatgtttctcatggtgagtctgctcatgccgatggcgtcggcaatgccgttcaagtctccgcggatcagcgtaatatcagccgcttccatcgcgatatcggtgccggtgccggtgccgatggccattcctatatcggccgtggccagcgccggagcatcattgataccgtcgccgaccatcgccacacgccggccttctttttgcagccgggaaatctcttctgccttttgttcgggaagcacttcggcaatcacgctgctgatgcccgctgcttttgcaatggcttccgccgtcttttggttgtcaccggtcatcattatgacgtccagacccatatccttcaggcgtttcactgcggcgcgggatgtttctttgattgtatcggcgactgcgataagccccgccgctttgccgtcagccgcaataagcatgaccgtttttccctccgcctctaatcgggacatgtgcggaatcagtgcctcatgatcaatgtgttctgattccatcagccgtcttgatccggcaagaatcgttctgccgtcggcctcggcgtatattcccgaaccgaccctggcttgaaaacgggttattttcggtatggaaatcccccgtttttcggctcctgaaacgatggcttctccaagcgggtgctccgatcccgtttcggcggcagccgccagccgcaggagttcctcttcgttcattcccgctgccggtacggcgtctgtcagcaccggtctgccgtttgtcaccgttcctgttttatcgagtacgattgtcgtcaggcgctgtgtcttttctaaatgctctccgcctttaaagagaatgccgaattcagcggcacggccggaccccgccataatgctcgtcggagtggcgagcccgagggcacacggacaggcaatgacaagcacggcaatgaatttgccgatcgcttcagaaaactggcccggcgccgcccatacataccaaatgagaaaagtcagcacggccagccccagcacaatcgggacgaaaatgccggaaatgtgatccgcgagccgctgaatgggcgcttttgatccttgggcttcttccacgattttaataatgtgtgcaagcgcggtatccttcccgacattaaccgctctgattttgagaaagccgtttgcattgatcgtcgccccggtgacggtgcttcccggagacttatcgacaggcatgctttctcccgtaatcatcgattcatcaatcgcggaatggccttcaatcacctcgccgtccacagggacgcgttctcccggtttcacatatacgatgtccccagccaggacctcatcaatcggaatcacctgtaccttgccgtcccgctcaaccgccgccgtcttcgcctgaagcttcattaactttttaatcgcttctgatgagcggcctttcgccttcatctccaaaaactttccaagcaaaatcaaagtcagcaaaatggcgctcgtttcataataaagcccctcaacatggccgtttcgtccgagagatgcaatcgtcatgtacagactgtacgcgtaagcggccgttgtaccgagcgcaacgagaacatccatattggcgcttttatttcttagcgccttgtacgctcctgtataaaaaggccagccgatgatgagctgcaccggggtggcaagcgcgaattgcagccatgggttcatcaggatatcaggcatccagataaaagaagtaaaagaaaaatggctgaccatcgaccataaaagcggaaatgagagcacggcagaaaacaccagcctgatcagcagtttacgctgttctttctccttttgggacaatccgccgtcttggccgcccgtttccttatcttctaaccggtagccgagttttgccacagtctctttcagctctttcggtgtcacctctttcggattgtattcaacggtgaccgtttccagggcgaaattcaccggcgcgctctcaacaccctctattttgttcaggcgcttttcaatccgattggcgcaggcggcgcacgtcatgccttcaatctggaaatcggctttttcggtaacgacgtgatagcctagtttttcaattttatcttttatggcgctagcttcgattttgtcaggctgataggaaatgtttgaggtttcaagcgaaagattgacggaagcttcattgacgccgtccatccgtttcagccctttttcaattcttgaagcgcaggcggcgcacgtcatgcctcctacttgaatggtcatctctttctgttcactcaatgccctcacctcttctcacaaaccccaggggggtataaatatgataaaagaaaaccgcgcccgttcccgaagcgcgataacccctatacgacgtcataaccctgatcttcaatcgcgtcttttatatcggatacggagactttcttctcatcaaacgtcacatccacctgtccggcttccaaattcacctgaaccgccgtcactccgttcagttctcctactccggtctctactgctttgacgcaatgctggcaggacatgccttccacttgcagcgttttttgttccatgataaatccctccacatcttgttttttcttttctatgttaccatacccctgtagggtatttcaaaacattttatttcatttttttcacgacatccagcagctcggcaatcgcctgctccccgtttccgctctcgatggcgccggctacgcagtgatgggcgtgatcttccagcagatgaaacgcgaccttctgcatggccgcctgtacggctgaaatctgcacgagaatatccacgcaatatcgttcattctccaccatattctgaatacccctgacttggccttcaatccgtttcagccggttcagaatctggtctttttccttggcgcttttatgatttaacgattgatgttcggtatgtttgtccatttttcacctcggttttttcttcgttatcttcattatacagtcttgaaaaaccggtgtaaaaaaatttcaacacacaagttttaccagcgcgtatatagggtacataaggttatcacatatcaagagggggcaattcattgaaaacgatacaggttggcatattgggatatggtttgtcagggaaagtctttcacgcaccgcttttggacgtccttgatgattatcagatcaaaaaagtcatgacctccagaaccgaggaggtcaaacgtgatctgccggagactgaagccgtgcgcacgattgaagacattaccggtgatcctgacattgatcttgtcatcgtcacgacaccgagcggaatgcattatgaatcagcaatgaaatgtcttcttgcgggaaaacacaccgtcgtggaaaaaccgatgacggcgacttcggctgaagctgaggagctgagaagaacggctgaagataagggcgtcttactgagcgtgtatcacaaccgtcgctgggacaatgactttttaacgattcaaaagctgatacaggacggagcgcttcaagatattcatacatatcaagtcagctatgacctatacaacccggttgtacaggaaaaatggcgcgaaaaaagcggacccgccacgggcacgctttacgatctcggttcacatatcattgaccagacacttttgcttttcggaatgccggaatccgtcacggcacatgtgatgaaacaacgtgacaacagtgaaaccgtcgactgctttctagccgcgcttcattacggcaagcttcaggtcattcttcaatccagttcaatgaatgcggccagcggtccacgctatcagattcacggacggaatgcaagctttatcaaatacggaaaggacggacaggaagaggcgctttcagccggccaaaagccgattgacgacagctggggcgccgatgaccctgacaacttcggagagctgacaatcgcagcggatgaaaaaaggcatacagaaacaatcccctctgagaacggctcttaccttacgtactacaaactgctggcggacagcatcttaaacggaaaaccgcttcccgttacggcaaaagaaggcatcgatgtcatccgtgtcattgaagcggcgatgaaaagcagcgagcaaaaacggacgattgccctttaatataaaaaacctccctgccgacggcggggaggttttttttaagatcagaatgattttccggcttctttcgcgcgggcaatcgcatcttctttaatttgctgtgctttattcggttcagcattatgaccttcaacgattaagccgtcaaaagaaggaacgccgaagaagttcatcatgatgccgatgtaacggtggcccatttccatgtcagccgccggtccttcagaataatagcctccgcgcgcctgaatgtggagcgcttttttgtctgtcaaaagaccgatcgggccttgttctgtatatttgaatgattttccggctacagctacagaatcaaggtacgctttcataacaggcgggaatgagaagttccaaagcggtgtaacgaatacgtatttgtcagcagatgcgaattgatcgctcaactcgttcagacggccgactttcgctttttcattttcagaaagctcttcaaaacctgtgccggattgaagttttccccagccgctgaatacatccgcgtcgatatgaggaatgttctctttgtaaaggtcgatatgtacaacctcatcattcgggtttgattctttataagaatcgataaacgcttttcctgtcgccatgctgtaagatgtcttttcatcatgaggatgagcagtgatataaagtacttttgccattgtaaacagccctttcttattcaaattacacacacatttattatgaaatatgaatgtttttttatactgatcaactctgtaataattatagttacaaaaaaatcttttagcaactataatatcttgaaatcagtatatttttttagaaagtctttaatatcaagattccaagcagccgaaaaagcagaaacctcagtttctgctcaaaatcggattgggtttgcagaccggaatatccaatccaagattcccccgcagtgtatccgccggatagctttttcggtacagccccttttcctgaaggatcggtatgacatgatccacaaaggcttcaagtgtgcccgggatgtcagattgaatgataaagccgtccgcggcctctgcctgaaaccatgtttcaattaacgacgccaccccttccggtgtgccgataaagagggttcgcggaaacgcggcttcgcgcgccacttgacgcagcgtaagattccgggctttcgcatctcttttgatgcggtctgtcgtgctttgaaacgcgtttttcccgatgtcgcccaaatcagggaacggctcatccagcggaaaacggctcagatcataatcgtcaaagaatctggccacatatttaacggcattctctatcggaatcagctcggcgaattcctgatatttcgcctctgcttcttcttgtgagccggctataatcggactgattcccggaaagatccgcagcttcgaaacatcccggccgtaatccgccgcccgctttttcacatcatcataaaaggctttcgtttcttcaagtgaactggaatgtgtaaaaattgcatcggcattccgagcggcaaacgcccggccgctttctgaagatcccgcttggaaaacgaccggctctccctgtttggaacggccgatattcagcgggccctccacttgaaaatactcacctttgtgatacagtcgatgcagtttgtcaggatcaaaaaactgcccggtttctttgttgcggacgaacgcgtcttcttcccaggaattccacagaccgcgcaccacatccacatgttcctgggcgatggcgtagcgccggctgtggtcgggaaggctttctttgctgtgattgcgcgccgctcccgcctgcggagaggtgacgagattccagcccgcccggccgccgctgatatggtcaagagacatcagctgtctggcgatggtgaacggctcagtgaatgatgtggaaaaagtgccgattaaaccaagatgggttgtagaagcggcaagcgtcgataaaatagtgatcggctcaaaccgatttaaaaaatgcgggatggatttttcagaaatgaacaagccgtctgcaataaaagcgaagctgaacagccctttttcagcggtctctgctttttgtttgtaaaacgccacattcgtgcttgctgacggatcaacctcgggatgacgccagccgtccgttgtgccgccgacaccgtgaatcatggcaccgaattgaatgagatccgtccggctcattttctctccccctttatttccttataatcggcaagcgcccgttctacatgttcaatgccgacttgagtaacggcctgatacacacggctgtcaccgctgccgatttcaacgacggggacatggcggatgccgtacttagtctgaagcacgtcacgcaattcgtcccgctctgtcacatcaattgtttcgtaagctatggctttttcccgcaaatatcctttcacttcatcgcaatatgcgcagccctttttgctccagaccactacgtttacttcatgactcatgctccatacctcctataattgtgcggccggctggaccgcttcgcttaacagccggtaagacaatcgtttttcttcggcgtttttgataggcgacaaaatcacaaaatcggtaatgctgtattgaaccgataatcgtctcagcgcggcggcgttttcttcttttgttcctgcgaagacaccggttttttgtgtgatcagcttataaggctgtgtgactttttcaagaaacgcatccgcttgttctctggaactcacattcacctttttgccgtccttgagaatgattttgaccgattcacgcgataccacgtgtttttccgcttctgctttcgtatgcccggtaaataccatcggcgcgaggtggaattccgctttcgaccctttcggcagatgctcgtcaaaggcttgacgcgctttttctaaggcagtctcttcaccgtttatgaaataggcgaaaacgaaggaaatgccgagtttggccgctgacaccgcgctttctgtgctgccgccgagcaaaaagatgtccggcgcatactcggtatgcggagtcggccgcaatgacgcgtatcggtgcgcggccggaaaatcattacggatgaaatgagtcagctcttcaagcttttcctcaaataaacgggcgggctgcgcaagctcccgctgcaacgcatcggttgacagctgaaatccgccgggcgctttgccgacaccgagcgccacacggccgggggcaagggcggacaaaacccggaactgctccgccactttataagggctgtaatgctgcagcatcaccccgccggacgcgaggcggatttttttcgtgcttgcggcaagataccccagaacaatttccggcgccgagcccgctatctcttcattgttatgatgctccgctgcccagaaacggtcatacccgtattgttcggcctcctgggccaatttcaccgtttgccgcaaggcttcttctgcggtttgattttccgcggtgacactttggtctaaaatgcttaaacgaatcatacgacaggctcctttatgtgttcttttatgtcataaccgtaatcgggaagaacgcggcggaggaacttcttcgttctttcttttttcgtcttataaaagacttcctcaggcgtgccctgttccacgattgccccttcatccataaacacaatttggtcggaaactcttctggcgaattccatttcatgtgtgacaatgatcatggtggcgccggtccgcacaatgttaagcatcacctcaagcacttcgccgacaagctctggatcgagggcagcggtcggttcgtcaaacagcatcacatcaggatgaatggcaagcgctctggcaatgccgacccgctgcttctggccccctgacagctgattcggataggcgtgcaatttatccttaagcccaaccttagccagttcccgctccgcaatggcgtacgcatctgtttttttcattttccttgcgaccgtcagaccttccatgacattttgaatcgccgttttatgcgaaaacaaatgatattgctgaaataccatcgctgtctgtttcctcagtctgagaatgtcttttttggcgggctttttgcagttaatgacttcgccgtgtacagaaatggcgccctcatccggcctctcaagtaaattaaggcagcgcagaaacgtggttttcccagaaccgctcggaccgatgatggtcacgacttctcctttttgcacacttaaattgattccttttaacacatgatgactgccaaaatgtttctgaatgtttcttatttcgatcatactgcgcctccttgatatctggctgcccttttttccgccagactgtttacggcctcgagaatcagcgttaacccccaataaatcacggccgccccgataaatgcttccagaaacgcatagttatcggatgcggcaatcgtcgccgttccagtaatttcaggcactgcaacgattgccgcgattgaagtggtatgcaaaaaaccgatgcctatgttggtgaagttcggcagtgatatcatgaacgcctgcggcagaatcacgcgccggatcatctggccccgcgtcaggccgattgaataggccgcctccgcctgccccgtatcgacagccataatccccgacctgagaatttccgtcatataagcgcctgccgttaatgacagtgccatgatgacaaacacggcaaccggaatctgattggccgaccagccgagatggaactcacggctgaagtggtcggcaataagcggaacccctaaataaatcagcataatatggagaatcgcaggggtgcttcggaaaaaagacacgtaaaacgctgagaaggcaaacagccatttgatgcggaacacacgcaccgttatattgccgagagctatgaagaacccggcgataatcggaatgaccgtcatcgccaatgtaagcggaacggttttcatcatttcttttatcgcagtgccgataaacggaatgtccagctccaatgttctccctcctttttaaccgtgcgagctcatgtcaaaaaccgtcacaagccgcgtctcatctttcttgattcgtttttcggcccatctgaagacacattcaaataaaagggcggctgcataatacagaacagaaagcgagatatacacttcaagagaatgattgctcgatgtaatcaaggtctgtcctctgcccgacatatccatcaccccgattgaaaaagcgagtgacgtatcttttaagaaaccgatcaccatattcccgatgttgggaaaggcctgcaaaagcgcctgcggaagaatgatgcgccggaatgtctgccccccgttcagcccgatgcttaaagccgcctccgtctgcccggcgtcgacgctgttcacacctcccctgatgatttccgccgctcttgccgcactgctcagcgcgtatgtggcaatggccgcatacaaaggatccattttggaggtatcaattccgccgagcgccgtgagcgccggaatgccgtaaaatacaatgaagagctgcaccataatgggcgttcctctgaaaaaagagatatacagcttcgcgagcggattcaaaacgggaatgcgatagatgcggggcagagccaaaagcagccccaatagaaagccgaacagcaaagacaccgccaatatatacagcgtgacgggcagatacccgagcaatgtcggcacaaaggacgcgatcatactgacatcaaacgctttttccattgccgatccctctctttttcacttaatattgttcctttgaataatccgcgccgagccacttttcactcagctttttgagcgtgccgtcgtcaatgatttccttgagggctttatcaatgtcatcactcagcgtttgttcatttttgttaaacatgaagaacactttggcatttgacagcaccccgccgaccgttttttctttgaccgcgctcgttttgttttgaaaatcgacggcaaacggcgtagaaatcgtcgcatctgcgcggccggatttcagctgattggccgcgtcgttggagccttggcccgcataggcgatgtcaaacgggctgccgtgtttttcattccatttcttcagcacaagcgctccgtttgacgtcggacttgtaatgacccgctttcctttcaagtcatcaatgccggtaatgttcccgttatcttggagcaccgtgattttcagcggaaagttgttatacgcgacttgattgaacagaaattttttctcccgttcggcgcttttctccatttgatgggccacgatatcgactttatgctggccgaggctgacaagcaggttggagaaatccatcgttttaaaggtgaagcgatagtccggcaggcgtctgtcaagctctttcaccagctcgacgtcatagcccgttaaattgcctttatcatcaataaagcaaatattcgggaattgagtgccggtgccgaccgtgatgttcttcacgtttttctgattgcctgatgccgcttccccgcctgcgctgcaagctgataacgccgctgttgcggcaattgttaatgacatgaccgccagtcttattttcatgtgatcgccccgttttctgcttcaattatttagtgaaacttgattttgaataatcagcaccgagccattttttgctcagctttttcaatgtgccgtccttctccagcttttgaatcgcgcgatccgtatcgtccgccaaggtttggctgtttttattgaacataaaatacacctcggtatccagcagcacatcaccgaccgtcttttgtttgaacgcgtgtgtcttattttgaaaatcgacggcaaacggcgtggctacggtggcgtcagcgcgtcccgtctcaatttggttcgctgtgtcattgctgccctgcccggcgtatttcaaacggatcgggctgccgtgggttttgttgtatgccgtcatataatccgccgcatttgacgtcgcgccgacgatgacggttttcccttttaaatcccggagtgtgtgtatcgtgttattatccgccttcaccgtgatgtacatcggcgagtagttataagggattttgtgatataaaaagcgtttttcccgttccttgtttttcgccatattgtgtgcgatcacatcaattttccggtttccgagacttgtgagcagattcgaaaaatccatcgtcttaaagacaaatttgtattgcggcagctgtttatcaatggctttcatcacttcgatgtcatagccggtcagctcgcctttttcatccataaaagcaatgttcgggaaatcagttcccgtgccgacaacgacggtctgcacgccgctcccggctttcgtgctttctccttgtccgcacccggccagcgcgctaagcagcaggagcagacaaccggctctgattcgttttttcatgatttcgcccagctcggtgtgcctaacagcgaggcgtcaaaccgctccggtatgagcacctttctcatcatgaccccgatatctccgtctttctcctgctcaaaatacacttcatagcctctccgtctgtacatatcaacaagccagggatgcttgcgcgccgaggtgccgagcgttaatgccggggccttcagcgtatcccgcagcacgtgttcctccacataagtcaaaagtttgctgccgatgccctgccccttcagttcagggagtgtcgcaaaccaccagacaaacgggtattttgacggaggcgtgtcactttcccacggaaaacggatcgtaattgttgaaagaagccgaccgtcccgttccagcacgacggctgaatgattttcaatattttctgttaccatatcaatgtccgcccgcgccgacggccagtcaatctccaaattgcggatcggctgaaacgcgctgtacagcagctctaaaaactccggcgcatccttcttctcagccaatcgaaaaatgtcttcactcattccggtcactctcccccataaatatataattccaatttgtttactgagctttaattgtttatactataaagcaaactgattcttttgactaatcaaaaaaagtaaagggaaggttcaagaaaattaatgaacagccgggaggggatgtcgttggaattacgcaccattaaaacgtttcatactatcgtacagtcaggcagcttttataaggccgccgaaattcttaactattcacagccgacgatttcaatgcggattaaacagctggagcaggatgtaggcgcgcagctgtttgaacggggaaagaagctgaagctgacaagagcggggcggctgtttcacgagcgtgccgggcagcttctcgcgcaatacgaagtgcttgaccatactctggccgatatcagacaggggcaggcaggccttattcaaatcggcatatccgaaccgacggcaagcctgatcttccctgccgtgctgcggggctttttagatgattatcctgacatgtcagtcaatgtcagtgtggacgatgccaatacatgcagccgcaaactgctggaaggcgccattgattttgccgtttgcggcgagccagagctgattctggaaaattatttcgatccgtttttccatgactcgctcaatgtcatcgtatccgacagacatcctctagccgccaaaacaagcgtcaatctcgaagatttagaaaatgaatgtctgatcttcacgcctgctaattgtccgattcggattcaaatcgaacagcacctgcagcgggccatcggcagccgctatcgaaaaatggagctgaccagcagcatggctcatcaatactatgtcagggaaaatatcggcgtctcgatctttacggcgacggcgcactcggagccgatcaggggcacgaaggtcattccaatcgataacttaacgatttcaccgccggtcgggctgttgacaaaccaaaaggaagagcattttgactgtgccacaaaagatttaatcagcagagtgatcagccggtttcaccagtgtgatccgcattaaaaaaacccccgcttcactttgcgggggttttttgtatgttcatcttatataatgctccgcaccaatccgccgtcgatccgcaatgcagatccgttaatggctgacgacagcgggctgcttaaaaaggcgacaaagtgagcgatctcttccgggcggatcaatcgctgaatgatggacgtcggacgattttccttcataaatcgtttttccgcctcctccgcggtcaggttttcaccgggataaagcgactccagcatcgtttcgacgccctctgttttcgtcgagccgggcataaccgtattcaccgtcacattcgtcccttccgtgagttcggccagactgcgtgacagcgacagctgcgtcgttttcgtggcactgtaatgggccatttcctgagaaggcatgacggccgcttcactcgcgataaaaatcacccgcccttccttccgttcaatcatccgctttgcatactggcgtgtcagacgtacgccgctcatgatattcacctcgaaaaaccggagccattcttcatctggaatatcaaagtattccgcaggttcaaaaattcctaaattgttgataagaatatccacatccgggtactgctgaaaaatcgcgccgcatccttccgccgtgcctaaatcgaaggcggccgggtagagacgggcatccggcgtctgtttctctaattcccgaattgtttcgtttaccttttcttcacggcggccgttaatgatcaccgccgcaccttccgcaatcagagaagccgcaatcgccttcccgatgcctgacgtcgatcccgtcacaagcgccgtcttccctttcaactgcaaatccatcatccattcctccctatcacaagttcttcttatatatggtcagaaatcgaaagcctgaaaccttccgtccctattatcggatagaaaaatggatgaggggaagtacgcactttttagtgcctgtccgttgtcccggctgacggctgctcaatttgaatgaaaaattcaccatctaactcttcctgagccttttttaatatccttaatacatcatcagcatccgaacccaattccttctgactggtctcaaaattcttccacaccaaagtcagtggaaattctatccagcctgtcagacaatcccataaggcattcagattttcaccataatagtccgggaaatctaattcatcttttaagattcggtgtaaaacttctatacttgtaacatcttttccgtctatgataactttcatatcaattgctcctttatttcagcatgaaaaaaccgcagtgcggtcatatgacggcactgcggtttttgtgttatgtatggagacggtgggagtcgaacccacgtccagaaacatcgattacttaagcgtctacgagcgtagcctgcatatttcgtgtttcactcgtcttcgtgcctgcgggcgggccttccgagagctagtctgtcagtctcttcttacgttctcagacgggaacgcaagcgtagcctacttagatgtgctcttcacggacacataggcaatgtcaggaagagctcgctgcgtttattaggcagctagtgctaagttttggttaaaacttttagttttgccagttatatttaggtgcgtgttaacgagatcgcctctcggctcgcagctcaagctcgatccatccctgtcgaatccgtaacgtccccttgttaagggtatacgggagatctatcaagctcttgcgcaactggctgtactgttattatatcatgaccacagacaaattcaattgggaattacttcaataaacagcctgtgaatctgatgtgtgaacagtatagcatagggcagtcatcacatcaaggctcacgcatcagaagcctttttgtctgtctctgaacgctctttcgatttctcttttagcgtcttttcgttttaaatcttcgcgtttatcgtatgttttcttccctttaccgaggccgattaatactttggcaaagccgtttttcaagtacagcttcagtggcacgagggaatagcccttctctttagtcaggccgatcagcttattgatttctttccggtgcatcaaaagctttctcgtccggagcgggtcgtggttatagcggtttccctgctcgtacgggctgatgtgcatattgtggaggaacacttcgccgcgctcgattttcgcaaaggaatccttcatgttcacgcggccggcgcggatggacttaatctccgtcccctgcagcacgatgcctgtttcataggtttcttctataaagtaatcatgatttgcttttttgttttgtgataatactttgcctgatccttttggcatgccttatcctcctctctccgcaaaaaccgttctgtgtgcgatacgctttattttagcaaatggagcgttccgcgacaatgaaaatgcggcttgcgaaagaaagcaaacagagcattttgccccatttgcttttcgcatttacttcttctttttgcgtttttgtttcggcgcgttttggaaaccgcgttttttctttttcttcttcggttttgtaaaccattcccctttttcctccgatttcggcggtgaagccggggtattgctgtttaatacacgtttccgcgccggtctgccgcgttttctgcggtcgcctgttgtttctctcggacggcgggtgcctttcatgccgacaatttcaaagtcgatgtttctctcatctttattgacgtccacgaccttgaccgtgatttcatccccgatccggtaaacgttgcccgtgcgttcgccgatcatggcgaaatgctgttcatcaaaacggtaataatcatccgtcataaagctgacgtgcacaagcccttcaatcgtattcggcagctcgacgaacattccgaaattcgtgacggaactgatcatgccgtcaaactcctcgccgattttatcaagcatatattccgcttttttcagatcgtccgtttcccgctctgcgtcaacggcgcgccgttccatcgttgacgtatggtcagcgatttccgggaggcgttcggcccatttttcttgagttgcttcgtccgattgtccgttgatcaaatacgttctgatcagtctgtgaacgattaagtcaggataacggcggatcggcgatgtgaagtgtgtataaaattcagtcgccagcccgaaatggcccaagctttgcgggtcgtatttcgcctgcttcatggaacggagcatgactgttgagatcactgtttcttccggacggtcccggacttcgtcaagaatgctttgcaatgcgcgcggatgaatgtctccggctgtccctttgacgatataaccgaatgtcgtgacgaactccaggaacttttgcagtttttcagcgttcggctcttcgtgaatccggtaaataaacggcacgttcatccaatggaagtgttcggccaccgtttcgtttgcgacaagcatgaattcctcaatcagcttttcggctactgagcgttctctgatgacgacgtcctttacggcgccttcctcatcgacgagcaccttcgcttctttaaaatcaaaatccacggcgccgcggttcatccgtttcgcccggagaatttccgccaggcgttccatgtctttaaacatcgggacgagcggctcatatctttctttcagctcagcgtcgtcttctgtgaggattcggttgacatctgaataggtcattctttccgtcgttttgatgacgctttggaagatctcgtgctccgtcacctgtccctgctggttgattgtcatttcgcaggaaagcgtcaggcggtcgaccttcggatttaaagaacagattccgttagacagcctgtgcgggatcatcgggatgacccggtctaccaagtacacgcttgtccctctttccagcgcttctttatcaatcggggaattctccgtgacgtaatggctgacgtcggcaatatggacgccgagcttgtagctgccgttatcaagctttgtcacggtgacggcgtcatcgagatccttcgcatccgcgccgtcaatggtgacaatgacctgatcacggagatcacggcggtcttttatgtctttttcatcgatggtgtcgggcgtacttgttgcctgctccatcgcttcggccggaaagtctcccggcaggccgtgcttatggatgattgataaaatatcaatgcccgggtcatttttatggccgagtatttcaacgatttctccttcggcgttcattctgccttcaggatagcttgtcagtttcacgacgactttatggccttccgcagcgccgttattggcatgtttcggaataaaaatatcgctcgtgatttttttatcatccggaatgacaaagccgaagcttttcgtttctgtgtatgtgcccacgacgcggtctatgcttctttccagaattcggatgacagtgccttcctgtctcgatccgcttgactgggagttgagccgcaccatgacgatatcgccgttcatggccgtattcagctcattcggcggaataaacacgtcgcttaatgaggtatcttccggcagcagaaacgcgaagcccttggcatgcgcggaaatttttccttttactaaattcattttttccggaagcccgtagcggttgcttctggtgcggacgatctgacccgtctcctcgagcgccaccagcgcttttaccagctctttaaattcttcggcttccgtgatgttcagcatctcctcaagttcctgaacggtaaggggcttgtacgcctcttccttcatgaacgagagaagacggtccataaacgcttctttttccattatccgacctcctgtttgttaccaatcgagtttctctaaaaattcgtacacatcctgatgaacgaggtcccgttctttgtccagcgtaatgacatgtcctgactcttcataccatttcagctgtttgtcgtccgtttccacctcgttgtaaatgatgtttgcactttctgtattaatcatatggtcatgccgtgcctgaaccacaaatgtcggggaatagatcatgtcgacgtttttgcgcacatcggcaatcagctcctgaagcgatttgagcgtattcatcggcgttttttcaaactccttcatttctttttcaatctgctccggctgttttccttcgaatttcttataattgcgcgcgtaggagagaactccttcgtacataacctcttcacttttaatgtgcattggcgcacacataggtacaattccctttatgggtacagtgtaacccaatttcaatgaaaaaaccccgccaagcgacagtccgcaggccgcaatgttttcatagccttcagaccgtaaatactcataaccgtccatgacgtctttccaccaatcttttggtcccgtatgtaccagctcttccggcggaacgccgtgccctttatattgaggcgcgtggcaagtgtagccgcgctcattcaagtagcggccaagcattctgacatctgccgtatttcccgtaaatccgtgcagcagaagcaccgctttgtctccgcctttaaatgtaaatggttttggtgtcacaattttcatgctcataaccccttttttgcacattcaatttagttttccacagttttgcgagaaacaaacgcggtctctcaacaagaaaaaggcctgatattaatcagaccttatacaaacattgccttatacgatatacgcaagcgaaatcgttaacacgaaaaacaagactgccagcacaacggttgtgcggtgaagaatcagatcaaggccccttgctttctgttttccgaaaagctgctccgccccgcctgaaatcgcacccgataaaccggcgcttttgctggattgaagcaatacgacaataataagtgcaatactgacgataaccaataaagtaatcaataatgtgtgcatcccatacacctccagactgactggcctacattgcttctattttacatgaaaagcaaaggcatgtcacgccgtatcggtacacatcatgtcagaaaaaacggaaatgtgtttgtctttcaattgttattgacttttgtcaacaaagtcgtagtaaaaaagatcttcaaatttcatgtcaaagtaatagagcatttttccgatgaccagctggcccggcctccgctctccattcagtacacggctcagtgtggcgggagatattccgatctccagggcgagctggtttaacgagtagtcattattgaccatatattgcagcacataatctcttctgatctgtatcttttcgaccactttcttcaccttccgttctgtcaaatactttctttcttatacataaccatacggcttttgttaacttttgtcaatacttttccagccttcctattccctttagtcaataaacatactagaatataaatagaccgcgggagggggagagattgtggaaagcttcgggaaacaattacggacattgcgggaaaaacggcatctgacagtgaaccagctggcaacgtattcaggcgtcagtgccgcgggaatctcgcggattgaaaacggcaaacgcggggtgccgaaacctgcaaccattaaaaagctcgcagatgcgttaaaaatcccgtacgaggaactgatgcagacggcgggatacatagagaccgttcaggaaacgggagtctcgtacgacacgggctgcaccttgctggaaaaagccgaaacgtatgagttgcatgatttatcccttttggagcgggagaactggcggcacctgtcgaaagaagacctggttctgctagataaatactttgcgttcttatccgcggaagccaaaaaaagaacaaatgaagactcatgactttgcacatgtgaggcgatcctaatgaacacattcggaaagcaattaagagagctgcgccgcgcccggaagcttaccgttaatcagcttgccgtctattccggcgtcagctcggcgaccatttcaagaattgagaacgggcaccgcggcattcctaaacccgcgaccattaaaaaattggcggacacattaaaaattccgtacgaggagttaatggcgcgggccggacacatcaagtcatttcaggaggaaatccgcgaggcccctgagagctatcaatccatatacgcaatctatcagacggccgttgccagaggcgcggagcatctgccgctgtttgatagcaaaaaatggcagcacttcacaaaagaagatattgaaagcgtcagcaaatactttgattttattgcggctgaagcgaaaaagcgctccccggattcctcatcctctttttgaaaccctccccaacttaacaaacgccagacatacgttccctcggattttgcggtataatagcagaagacgaggtgaaaaagcatgaagcaatcagaaatgtgccccagatttgaaaaggcagtcgacatcttgagtaaacgctgggtcgctcttatcgtctttcagctattgaacggacagcagcgcttcagtgagattgaggcagcgcttccgaatttaagcggcagagttctgtcagaaaggctgaaagaacttgaaacagaaggtgtgatcaaacgggaagtcattccggaaacgcctgtccgcattgagtattctttaacggaaaaaggctgcgcattagcccctattttagaggaaatttccaagtggtcttcacaatggattgatccttcctgataaaatcttttccgcataagcggctggtctctcaaacggacagccgtttttattttttcctttcttaaacaggaaaacaagccctcatgcgtgcagggcttgtttttgtctgatgccttccagcggaattcggatctccgcccgggcacctccagacttcttattttcaagtatcaattccccgtgatgaagatgtacgacatgatgggcgaatgtaagccccatgccgtgatgccccgccgaatgtctgcttttatcttccgtgtaaaaaagctgtgtcgcttttttcagcgcttcctgcgagaacccgcttccgctgtcggatacggcaatactgagtgcgttatcggtgcataggacgttcacacggatttctcctctttccggcgtatagtcgacggcatttgccgcgatattcatgaccgccctgcggagcagttcttgatcaatcggcgcttcttttcggtcaatgccccgctcactgaggacgagatcaatctgcttcggccccgcaagcgccgccgcgtcacgatatatgttctgaacccactctctgagatcggtatattccagatgaacggcaactgcctcctccgctttagaaagctgaatcagctgcccgacatattgctcgattttgtttccggcatcaaggatatactgcgtgtattccgtctgctcctcatcaggttctgttaactgaagcagctcggcatttcctttaatgatcgttgccggaattttaatatcatgcgcaagcgcgccgatctgttccttttttatccgctccgcctcccattgcgccgccagagatgcctgaagcgcgtctttcattttcagcagagagtcaatgacatcgtcgaattcctttatccgcgacctttttggattgatatttaaattctgtttttgaatgcttgccgtgatggaactgagtgtgctgaaatgccgtctcagctgattggcgaatcgcgtagtcacgataaacacggttaaaagaagcaaagtgatcagaaccgcaaggcccgtccattcataattcggcagatagcgccttagcagaggcgactgaaattccgacctgagtgaatattggagaacgccatattcatttttccgatcaaccaccatgaatcctttttgagcataattaaaatacggctgatgctggatcttttttctggcgttggccgcgtctttttccgtcatcgttcctttcgtcatccgctttgtttttttatcaaaaacggcgtatgtcataccgtcggggaccatgtcttctgttatcttttccgccgatttcaggcggggcttgatctgttccgcctcatgctcgctgtaatttgccggcaggatcgctccggcattcagggcaatggcatttaaggcgacacataatgccgccacccccatcgtgctcagacacagcgtgatggtaaatttgacaagctctttgcggatggtggattttccttttgctattcccatttgtatccgacaccccacaccgttttgatcggatcagccccgtgttctttacattttttccggatggttctgataaactccgtaatggttgaatagagcgcatcgccgtccaagccgtacacttcctcgtaaatctgttcacgtgagaatgttctgtttttgtgctgtgccagaaattctacgattttatattcgtttttcgtaagaggcagtttccggtcatcaatccatacttctttattgtcaaaatcaaacatgaagcctgatatcaggcgtttcgtctgacgcttttcccgactttcccttctgacatgcgcgtttacccttgccatcaattcttttacgccgaacggctttgtgatgtaatcatcagcgcctgtcatgagtcctttcacaatggattcttcgtcagactttgccgttaaaaacaggatcgggctgtccaccagcggccgaatcctccggcagagttcaatcccgtccgttccgggcatcatgacatcaagaagaatcaaatcatagccttgaaaaaaatccaatgactgatcttccgctttttccagaatcgttactgtatgctgatcacgctgtaaaatgtttctgatcagaacgagaatatctttttcatcatctaccgctaaaatgtttgccaccggccgaatcgctccttgcctttattcatatgaacgccgcccttcccatcttctgcaccaatagagtccggccagacataatatcactatagaaaaatataacattatttctccgaatctcatatcgtatctcacataagggagaaactcttttttgactttgtcaaagtgcagcagcgcttcaaggcccgacagccgcacgctccatgcccacgggaaaaaacgccagatgacatcgcccaatcccgtatacatcagcgccgccattaataaacccgctccccctaaaagcccggacggtcccatgccgtactttataccgacaaaaaaagacatcatataaagcggaatactgccggcaatcagccacacccctccctttaaaaagagaaagtacggaaggtcattgatgtgaagaacaaatttcatccccgccaaataaagacagatggcaagacctatcgataacacattcaacagcagcaatagaagcagcttgcttgcaaaactgacgatttttgaatgcggaaccgccagcatcatctgaaaatggcccgcctgttcctcgacggaggcagacatgccgcagacaatactgatgatgaaagggtataaaacggcaatcgcgctgaagaagccgctgtacagcacataaggctcctgaatccttccatacatcatatacaacaggaaaaatcccgcgcatacggccggcgccgcaacatgcatccatatgagcggcgtgcgcttcatttttaatacatcggcccacatatatctcaaaagcacggtcatgaccggtttcccccttttgcaaaagacacggcggaaatcaagcttattgcgataaaagaaaggatcgaaagaataatagccggaaagatcacgtttccgtttaataagccgctgtctgcgggaagttgaattccgttcggatggattccgagaatcggtgacatcacccggactgaccagctccacggactcagccaccacaatgaaccggacgccggcactatacccaaaacaaaggcggcgatcatattcacgaggatgactgccgaaaacccgaactgtctggcaatccataagcacaatgggatttcccaaagtgtcgtcagccataaaagggagcctgcttcaacgcctttcagctgcagcgcagcaattcccggaaacacaaggccaagtaaaaacataatgatgaaaaagacgatttgcgacaggagtgaatacagcgcgatcaagcttatttttgagagccatatgctttttaaacctgccggcaatgagtacaccgcgcggtcatgcgcagattttttctcttttttaacagataaaccgcacattagagcaatcatgagcggcatgaaaataaccgcccaccaattgaacgtgcccgtcataaaataggcggcattcagcagaaaagaaaaagccgtgttcagaagcggaatcaaaatgatcagctttctgataaatgttcttttagatgtaaggtgttccgcctgcatgtactgaatcatttcccggtccccgctttctcccttgttgatttgactacctccagaaacagccgctccagatcgtcttcccggctgatttctccctgataccccaaaataccgtcactgatgattccgatatgatctgcgatctgctcgacttcagataacaggtggcttgataaaatcaccgtcattccctgtccgggcaaggagcggataaattcccgcaaatcctgaatccccatcgggtccaatccgtttgtcggctcgtcaagaattaagagcgacggacggtttactaatgctaacgcaatgccgagccgctgtttcattcccatggaaaattggccggctcgcttttttccgatccccgttaatcccgtgatttccagtacttccgcaattcttgaatcaggaagcccgagcatcacgcagcggactttcagattttcggcggctgtcaggttgctgtaaagcggcggcgcttcaatcagggaaccggtctttttcaaatcttcgcgcttccatggatgcccgtcgaacagaacctcgccggatgtttgccgcaagatgccggtcaatattttaagagtcgtagattttccggcgccgttcggaccgagcaggccgtatatactgttgtgcttaaccgatagagaaacatcagccactgcctgttgtctgccgaatgatttttgcagctgtctcgtttctaagatgttgctcatatgattacccctctgctttgttatttgatatgtaagactttacagcgcagttatcaaaatttaatcaagaaatcaaaaaaagcatccttcacgcggaagaatgctttttttcatgaggctgagcgtacgatcagctttcttttttgttttttcacggggctgagcgctcgttccagccacgccatcagcaggtctgcggccactgccatcagcgcggtcggaatggcacccgccaaaataatggcggtaccgtttgtcgcgttcgagcctctgacgatcatatccccgaggccgcctgcgccgacgaaggtgccgattgccgtgatgccgatggcaatgacgagcgccgttcggagacccgccataatgacggaaagcgcaagcggcagctccaccatgcgaagtacttgatatttcgtcatgcccatcgcttttcccgactcaagataagcgtgctcaatattgatgatacccgtgtgcgtatttctgagaatcggcagaagggaatacaaaaacaaggccgtaatgaccgtattggcgccgagccccatgacaagcatcagaactgcgagcatcgccagcgccggaacggtttgaatcacgtttgccacagcaaacacccagccggagagacgcccgtgcctggctgtcacaattcccgccggaatggcgaaaacggctgcgaaaacgacgccgtacgccgacatgagaaaatgcctccaacactcatacagaacatagctgccgttttgaacgtaatacgtaaacagctctctcagcgtgtccatccgcacatctcctttccgttattcaaagtaatgatgtttttctaaatattccttggccacgatggacggctcttttaattgtccgtcaacttcgtaattcattttctgcatcatctttgtatcaatcgcgccgatcatttgattgatcacgccttccagttcgggatgctcttttaatacacgatccggtacgacgggtgaacagtcgtatggaggaaagaaccgcttatcatccttcagcgttttcagtccataagcaatgattcttccgtcggtggaatacgcgagcgcgatatccattttcctgcttttcagcgcgtcatacacgaggccgatctgcatcggatacgtgccttcaaatgccattccgtatgttttcataaaatcctggtatccgttgcctctcagcttcatccaatagttatcaacgccgaatttcagatgagacgcttcttttttgacatcggataccgtttctaaatggtatttgcgggcaagctgtttggaaacggtaaaaacgtatgtattatcaaagccgtaggaatcaaaccatttcatatcatatctgctgtgaaattcacgctgaacgagccgcagcgctttgtccgggtctttttccggctccatgcgcagcgtgcccgtcagcgcgtctcctgtatagcgcgtagcggcgatatcaatatcaccgttctgcaaagattgctgctgtacggcatttgagccgaggtttttaataacggttgtcttcaaaccgctgtgatgttcaatcatctgtccgagcatgctcgcgatgatttccgattcggtcatgctttgggcgccgattttaatggtatcctccgatgcggcgctcaatcccgggagcgagcatccgccaaggagcagcatgccgatacaggcgaatgcgagcagccgttttttgcatctttttcccatagagacctcctccttatgaagcgttctttaagtccttcagcccgtcaggcgtaactttccgttccgtcatccccagcgcgtaatcgacggcggccgccaaaatcgtgaccggaacggcgcctgcgataatatactccggctggtaaaggttcaagccgataaaaatgtaatctccaagtccgcctccgccgataaaggaggcgagcgtcgcccagccgattaaataaatcgaggatgtccgaatgcccgccatgatgaccggggcggcaagcgggagctctacaagcctgatctgctcccatgcggccatgccgatccctttacccgattcaagaagatgccggttgacgccgagaatccccgtatacgtgtttctgagaatcggcagcactgaatagaaaaacagcgccgcaacggccgggacctttcctacccctaaaagcggaataaaaaacgcgagaatggccagactcggcaaggtttgaatgatgttgacgatgccgatgacggcgccggcgcctcttttcatcctcgtcagcagtacgccgagcggcacggcggcgagaatgcccgccatgacggcgattaatgagatgtacaggtgctcccatgttttataaagcagctctccgccgtttgcctgtaaaaattgcacggtctcattcataaaaattaatcctcctcatgacattaccgcaagctgattctcttctccccaaatggagtcatagacgatgtcaacgaggctggcccttgtcacgattcccgttaaacggccggcgtcatcaatgacgggcacaaatttcatgcctctttttaaaattttatgaacggcgtcgcgaagcagggtgccgcttctgaccgtgtacaggtcccgctcaagcacttccgcgacgagtgccgcctgttttcgtttgcggtcaatcatttccacatcgacataaccttggagaacgttcttctcatcaatgacgagcagcgaatccacccgctcggcgcgcatcagctgaatggcggctgacagcgttttctcaggtgttatcgttacaggatcgggattcatgatctgctccacccgttcaatatcagggctggatgattggatcagccgttccttgccgataaactcctctacaaattcattcgccggaaatctgagaatttcatcgggcgttccggcctggacgatttctcccgctttcaaaatgacgattctatccgcaagcttgatggcttcgtccatatcatgggtaacaaatacgatggttttatgtaaggttttttgcagttttttaaattcttcctgaagggaatccctcgtaatcgggtcaagcgccccgaacggttcatccattaagataagcggcggctctgcggcaagtgcccgtaatacacctattcgctgctgctgtcctccgctcagttcatgagggtaacggtctaaatattcaggccccatatcaacgagctttagaagctcccgcgcccgttccttccgtttgtcggcaggatgctttaaaagcttcggaacgagagtaatgttctgctgaatggtcatatgcggaaacagcccgatctgctgaatgacatagccgatgcttcttctgagttccaccgggtcttgttccataatgttccggccttcaatcaagattctgccttcggacggttcaattaagcggttaatcattttcatcgtcgtcgttttgccgcagccgctcggtccgataaaacaaataaattcgcccttatcgatattcagattgatgctgttgactgctttttttccgcctttatacgttttggagacattttctaatgtcagcaaatacccacacctccacaattaagtttattcaatttgttaaattcgtatttaacttttcagacaattgaacgtttcccattataaattaaactttataaaataaaaagtttacaatttgtccatattatatataaagtatgtgtaagcgctgatttacccgtattgaccggcaaagttcttcttattgcttcgaattacttccaaattctctcgtaagagcatttccgccggtttaaaaatatggtatattgacatcggaattgctgactgaaaggattgaaactgttggagaaagatccgttacacgtaatcgaacaagctgaagatcatttgatagaacgaatcgctgaaaatatgcatacattcgggatgcccgcgacggtggggcgcattttaggcattatttatatgaaccgcaagccgatgaccttaactgaattatcagaagcgaccggcatgagcaaaacgagaatgagccaggccgtccgtgaaatgcttgatgtcaatctggcggaaaaagtgtttgaaaaaggcgtccgcaaagatttatacgatgtcgagcaggattattaccaaacctttattacgctgtttacggccacatggagcaaggtcgtcagcaaaaataaaatgatgcataaaaagctgaaccgcgaactgacagccgcgcttgaaaacggcgttccggaagaagctgaggaaaaaatcaacgaactgctgaaagaattaaaggattggcttgattactacaattggatcagccgtctgatcgagtttttcgaaagcgaagaaattttcaagcacgttccgaagccataagaaaaaacgccctgacccgcaaggcgtttttttcttatgccgcattcggcgctttggttcgttttttcttcttcaccgggctaagcgaccgctccagccacgccatcacaagatctgcgataacggccatcagcgccgtcggaatggcgccggctaaaataatcgcggtgccgttcgtggcgtttgatcccctgacaatgatgtcaccgagtccgcccgcgccgacaaacgttccgattgccgtaatgccgatcgcgatcacaagcgccgtccgcagccccgccataatgacggaaagcgcaagcggcagctccaccatgcggagcacctggaatttggtcatgcccatcgcttttcccgattcaagataagcgtgttcaatgctggcgattcccgtgtacgtattccggatgatcggaagaagcgaatataaaaacagcgacaaaatcaccgtattggcgccgagccccatgacgagcatcagcaccgcaagcatcgcaagcgccggcacggtctgaatcacgtttgtcaccgcgaatacccagccgcttaattttctgtatctggcaatgaagatgccgagcggaatccccacgatcgccgcaaataaaacgccgtataccgacatgagaaaatggcggtaaaactcctgaagcacataggcgccgttttgagaataataagtgccgagctgctgcagcacttccatttgccccacctcatttcttattcaaaataatgatgtttctccaaaaattctttagcgacgacggacggttctttcagcttgccgtccacctcgtaattcaattcctgcatcgtttccgtatcgattttgccgatcagtttattcacaatgcccttcagttccggatgctgtttcagcacgctgtcgggaatgaccggcgaacagtcatacggcgggaaaaattgcttgtcgtcttttaaaattttcagatcgtacgctttaatccgtccgtccgttgaataggcgaggacggcgtccatttttccgtttttcacggcatcgtatacaagtccgatctgcatcggataggttgtgccgaattcgaagccgtacgtgtcggtaaagcccttatagccgtcgcccttccgtttcagccacgcattgtctacgccgagcttaaattgatccgcatacttcttaatgtcagacactttgtctaaatggtctttttccgcaagctctttcgagacggtaaaagcgtacgtgttttcaaatccgtaagaatcaaaccatttgtaatggaagcgtttctcaaattctttctgaacgatggataacgcttttttcgggtctttttccgcttccatgccgagggtgcttgtcaaatctgttcctgagtagcgcgtcgcagcgatatcgatttcaccgccgagcatcgcctgctgctggacatagttcgatccgaggtttttaattaatgccgtattcaagtctgtattatgctcaatcatctgtgcgagcatattggcgataatttcggattccgttatgctttgcgccccgattttgatcgtatcatcggaggctccgctaagtcccggcagagaacagccgcctaaaagcagagcagccgaaagcgccagcgcgcatatccatctcgtttgttttcttttcaaaacagccaactccttatgatacttccttcaatcctttcagccctttcggcgtcaccttccgttccgtcaccgcaagcagataatcaatgataatggctaaaatggtgacaggcacggcgccgcctataatatattcaggctgatagaggttcaggccgataaaaatatagtctccgagtccgccgcctccgataaaagaagcaagcgtcgcccagccgatcagataaatagtggatgtgcggatgcccgccatgatcaccggaatggcaagcggcagttccacaagcctgatctgctcccagaccgtcatcccgatgccctttcccgattctaatagatttttgtttacgccttgaatgccggtgtatgtgtttcggagaatcggcagcaccgaatagaaaaacagcgcgacgatcgccggcatctttcccacccctaacagcgggataaaaaacgccagtatcgcaagactcggcaaggtctgcacaatgttgacggcgccgatgacggcgcctgcgccctttttcatcctcgtcagtgccactccgagcggtacggcgacgagaatgcctaatatgacggcgataatcgaaatgtataaatgctcccacgttttatataacagttctccgccgttcgtctgcaaaaacttgatcatttcattcattgtaagagttcctccccttgtcagcctgtcaccagctggtcttcctcgccccagattgaatcgtaaacgatgtcgacaaggctcgctctcgtgacaatcccgaccaaatgcctttgttcatcaacgacgggtacatatttcattccccgctttaaaattttgcgtacggtatcgcgaagcagtgtgccctgctcgaccgtatacagatcagagcggagcacgtcgccgacgaggctcgcttttttccggttctgatcaatgatttcgacatcgacatatccttgcagcacattcaggtcatcaacgacaagcagggaatcgacacggtgttcccgcatcacctgtatcgcgtgtgaaagcgttttgtccgccgtaacggtgacaggctttttgttcatcatctgctcgacgcgttcaatgtccggtcttgattgcaataaccgttctttgccgataaattcttcgacaaattcattagccggatttctgaggatgtcatcaggcgtgccggcctgaacgatctctcccgcttttaaaatgacaatccggtcagccagcttaatcgcttcatccatatcgtgggtcacaaacacaatcgttttattcaacgttctttgcagttttttgaactcttcctgaagcgaatcacgcgtaatcggatcaagcgctccgaacggttcatccatgagaataagaggcggttccgccgccagagcgcgcagcacgccgattctctgctgctgtccgccgctcagttcgtgaggatagcggtctaaatattccgggcccatatcgacgagcttcaatagctcacgcgcccgttccttccgcttttgttccggccatttcagcagtttcggcacgagggaaatgttctgctgaatggtcatatgggggaaaagtccgatctgctgaatgacgtagccgattttccgtctcagctccacagggtcctgctccataatattctcgccatcgatgaaaatctttcctgatgacggctcaatcagtctgttaatcattttcatcgtcgtcgttttaccgcagccgctcggcccgataaaacagataaactcacctttttcgatcgttaaatcaatgctgttgacagcttttttaccgcctttatagacttttgaaacattttctaatctcagcaatccgtgcacctccgaagggttccgttatttttctgaaaagtataatctttattataagatgaaatttataaaataaaaagtttacaatgtgttgaaattatatataatatacgtattatttcatgttatcccgctgacaatacggacgttcttacaatctctcccgatagctcgcatatcctgccgcattgtctttttcaacaactgtaaaaaatatgatatattgtctccatgaaaagccagtgaagggatgatcagctgtggaaaaaaacgctcttgatatcatcaggcatgctgaagagcatctcattgagagaatcgccgagaatatgcatacattcggaatgccggccaccctcgggcgtgtgctcggtattatttatatgaaccgcaagccgatgacgttaaatgagctgtcagaggcgaccggaatgagcaaaacgagaatgagccaggtagtccgtgagatgaccgatgccaatctggctgaaaaagtgtttgaaaaaggcgttcggaaagatctttacgacgtggagcgtgattattaccagacgtttatctccctgtttacggcaaattggacaaagacggtcagcaaaaacaaaatgctgtataaaaagctgaaccgcgaactgactgagcttctggaatcggaaaacctcagtcccggcgttgaagaaaaagcccgtcagctgttggacgaactgacggactggctccattattatgactggctgagccgtttgatagaattttttgagagtgaagaagtgtttcagcatgtgccgaaaatagaaaaaagcagcccccgaacataaccgggggcgctgctttttttcagttcaggaaaccaatatcggaaacatgcctttcaggccggcgccgatcatgccgatcgccaccaccgccaaaatcagtcccatcagccgggtaatgacgttcatttcggttttcccgagcttgttgctgatgaaggatgaatagtgaaagaatatgaacgtcatcgcgatgacggccgcaatgccgataagcacgctgatgtaatggaagatgccgccatggccggccgacaggctcatgaccgttgcgattgtaccgggaccggcaataatcggaatcgacaatggcgtcacggaaatatcggctttctccttgctttcccctttctcttcatgatgaagggactgaacatgggattgtttcgcgttcagaagattataagcgatgccgaaaataaaaatgccgcccgcgatacgtaaagcatgaatgttaatgtcgaacagtttaaagatcagatggccgaagattaaaaaggccgccaagatgataaacgacagcacggaagccttgcgtgcgatcgctgtccgttctttctccgggtacccctctgtcagcgaaagaaagatcggcacgtttccgatgggattggacactgcaaacagggaaataaagacatgaatgataaatgaaaacatgcgcacctccttatggcttgccattattggtttatgttttgttttccgctgtttcttatgcatgattcttacccggaggtcttttttttgtaacctcagccggccgatccggaaaaagaaaaaaaccgccctgatcaggacggtttttttccatgtgctatctccataaatgtttgccgaatttcaacagccgataaagcatttttaattttttaagcatctgttaatgtcctctatcactccgaatcaatagttccattaaaattctaccataatgggcactttttctctattatcaaataataaagacattgaattgtatatctttagaaatctccgttacatccgccctattttcttttataatgtaaatattgaacaaaatccctatatttcataaaaaaggagttttataatgtattgtcctcaatgcggccatcaaacggatggcggaaagttttgtgaaaagtgcggggcgccccagcccggacagggaggcgcaggccagatgcagaaccaggccgcgcaggccggggccgccgctaagcaggcttcaaagcaatttgccttattcgtgcttgatgttttaaagaaaccgtatcagacatgtaaaacgacaggcggcgaacagcttgtcagcagtatcatcaacatggtgcttttctgtctggtgacgccgattatgctgtatattctcttatcagacggctttcgtgacgtcagttttaccgcggttgtgatcaaaccggcgcttacctttgcattatgcgttttctgcttatatcttttgatttttatcgctttaaaagcaggcggcgcgcaggtgtcgtttaaagattcgctgtccagattcggagcatttttgattccgtttacagctattttgcttctcgcactcatttttatgctgctgcacacaaccgtttgctttaccattctggccgtcggtcttttaggagcggcgtttgccgtgcccccgctcatgctggcgagctatcagcatcagctgacggctaaggcggatatcacttattttgttatcatcatctatttgatcatttgcgtaacctttcaattcacgatcaagcattatataaaagaactcatgaattattttttcttttaaaaacggaaacccccgctgcctgagtggcgcggggatttttttattgaatggatgttaaataaattcttccgtccttcacaacgccgccatacgtccaattgtatgttctgagctttggactgccgccggctttcgtaatataaaactcctcgtacgtatgaatcgtcagatgagagccgttctgcgaaaagctttttacatttacttcattaaatacttctgtcgttccctcgctgtgcagttttttgaccagtttctgctgatcagcatacaaagggcttccctcttctaaattacccgccatgatggcaaaattgttaaggctgacagcgcttgattggtttgtcaggtaatcaaccataaacgatgtgacttgttcatttgtgaggctgcctgaagctgtgtttcctttggatgatgcccatgcggatgtgtaggtcttcggctggtcgttttttatttttttcacatttgtcccagaagaatctgaggctggatcagctttttcaaaaacccattttttatgttttgtatcatatgagagtacataatgaaagctcggttccgcctcttccatatcaggtttcgtattcccgtcgaaatacgccgactgatggagctctttacctgtaacggttacttgccagcggccgttctcttgagaaatcgcaaatgaatcaagatcaaagcttgtctctttatactgatctttcaaaaaagtgccggaactcttcatgcctgaaaccacttctttcgtctgctctttccacgctgaaccggcctcggtcatctgatcagtatttccgtctgccatggctttcgtatactgcttcgttgttttgacaatcgtgtccatgattgttttttgtgtatcttgatccgggataagcgttaattccatatcagtactgttgatcggaacatcggcggttttcgtttgcccccaaggaaaatcagcctccacggctgctgtcatggaaccgtcagttaagagcgggccgtatgtaaccgatgtaaaaggatctttatgaacggatttgccatttatcagcagatcgccttttgcgtttttgaagctgtctgccggagtaaacgtcacatcctcggcgtccagcggcaggttaaactcaacattccggctgccggctgcctccgcctcttgctttttgacaacatcaactgtatcatttttcagcttggcttccgccgtatagacacccggtgcgtaggggccgaatgtttgggtgtcatcggcttttttgaccgtgcctgttttctcgctgttgatataaagatcggcgcctttataattgcttgtgatgcggaaataaaccgggtctactttcagctcgtaatggtcaaacaagagaagggtttttccctcctttttgacgtatacggcatctttttccgacgaatcgccgcgaagcgatgccagcagttcatcgtgtttctttgcgtatgcaaggagcggtttgacattggtctcattcagcttcagttttttgtctgaaggggtgagaagggctgcgagctttttcgtgtctccgtcatgaaccgcctgttcgaattgatccgtgagccttttttcagatgtcagccaggctccggttttatatgcggcaatcaataagatcagcgctgcagcgatgcctccccataggaagagcgtttttttaggaatgggctttctcggctgtgatgcaggttcagccgctttttcagccgtctgtcggcttcctttcccgatcggctttccgcattctttacagaaacgcgcctcttcattgttctgctggccgcaatacttacaaaaaaacatgactttcctcctattcaatctgcaaaacttgtataacttttcctatgtttcatattttataataaagtagaatgattttggagttattttgaaaaaatagctgtcgatcacaatgaaggaggagaaacagacatgcaaaaattgagcatccgaaaagccggagagccggatgaagcactgtatgaattactgctgctggccgatccgtcgcgggagattgtcgatgattatcttgcaagaggcgagtgctatacggcttgggcatcagacgagcttgcaggggtttatgtcttattgcaaacaaggcctaaaacgatagaaatcgtaaacatcgcagtaaaagaatcgctgcagaacaggggattcggaaagcttctggtgcgggatgccattgaaaaagcaagacaatcgggagctgacacgattgaaatcggcactggaaattcgagtattcatcagctgtcactctatcaaaaatgcggattccgcattcaggctgtcgaccatgatttttttatcagacattatgatgaagacatttttgaaaacggcattcaatgccgggatatgataaggctttatatggacttatgataaaaaggggcgccggctgatatcggcgccccttcgtataaagttcagacagattgatccgcttgtttctctgtatttctttgactcccttgcctgactgataaaatagcaaaaacgactataagggtcagtccgaccgctgcgtaaacatagtccgcattcatcaacagcagaagccctgtgtagacagcggccgacagcggttctcccatttttacaattgaaaaaatcagtgcaaagactcttccgaaatatgcggccggaaccgtcttttggaaatacagcaccgtttgcacatcaatatacgagatgatgatgccaagcaccaggaagatgatgcactcaaacccatgaagggggaaaaacaggagcataatgagcagccccgctgccgttaacgtccgcgggtacagccggttcaagcgttttgtattccatttgaaaaatacggccagattgcccaaaagcattcccgcctgaaacattgaatacatgacggcaaaccatacagaatagttctgctgaaaacgctccacagcaagaatcggccccattactgaaatgaaaccggcaatgacgaggttcacgacgaaaaagtatccgaccgatgtcagccatgccgtatttcctttcagcattctgtatccggcttttagatcttcagcgccgctgcttttttcaccgggctgttctgaaatacgaatgaatgtgatcaataccgcggagataaaaaaagcagttccgtttatggcaaacagaagtccgaacggaacagccgcaatcatgataccgctgatcaattttccgacaatcagtccgatcaagtcactcgtattgatcagagatgtcgcctgatcaagatgctgtttgcggacgagcagcggaatgatggcgactttcgccggagcaaacagcatcgattgcagtgataaacaaaatgcgcacaccccggcaatccacacggttaataaatcgttcgcgctgagcaccgccaagaggatcataatgacggcacggcccgtgttgcacaaatacaagatcgacttttttcggaataaatcaatcagcggtccggccagcactccgaatgtcaacggcacgagttcgataaaagagataacaccgacaagaattttgctgccggtcaattctaatactaacagcggcagggcaatgagccagacaccgtccgccgctgaagaaaacacctgggcacaccaaagctttgcatagttcggtgttcgatacgtcatatcaggcccttttttgatcctcatcagaaacaccgccgaaccattccagcgttctccatgattcacgtctttttgtataatccttttccattacctcaaatacaatgccggtatcttgatcccgataaagctcctgcaaagtatcggcagcccgtctgagcagctcttcagcgattgtcccttcacgcggatggcggccctccaagcagcggacatcaccatgcgggaacgccagctggcgaaatgagctgaagtgataatgcttaatgctctcttttatcgaaagaaactgaaagaaatccgggtatctcagctggtcatttctgaacataagcgctgaagacaagtgagtctgataggtaatcgcccagtggcacagatcccacgtaataccgacatgcttcagatccagctgaaccagttctgtaaaatcttcaggataaatgaaaatcggatcaaaatcctctcccagattcccgatgatcggaaggttttccacaccgatccaaatgtccgttcctttcagctgctcatcaaactctgcgaaaaattcaacaatttttttgcggttgccctccaggtcatagacttgaaattcttcaaccgtcataaattgattcgcatggacggttatgcctttggcgccgtatttaacagcaagctccgcaaagtgataaagctgttttttaatttgctcttcatgcacataatcggcgtgatctgtcgggaaatgcagcgtcaataatgaaggatcaagctgttttgcatattccagcgtctgattgaatgttttgctgtaatccgcttcctcaaaggaatggccgtcaaaaatattcgcttccagaccgtatcccgcttccacccatttttcatcgatttgcttcggatcaagtccgaaaaacggaatttgagcaatcataggacagtcaccatgtccctctcacaagcataaatgcttccgcagcggaaaaacccgattttgctccccacacatgggcattatgttctatcgcctgcaaagaacggggatgagggaagtctctgagctccgagccgtaacacgccatcgatttcaatttcgtttcaagctcgtcttcaatattaacgaagaaattggcatgaaactgatccttctgacaataattccattctgtcgaagacaatgtttcataggcgaaaaccctttttaccgtatggccgggaagcgggcgggttgccgtcatgaccgctctgaatacgacggagtggtcaatattaatatcacccccgtactgggtatacacaatgtcaggctgaaaacggctgatttgtttctccgcttccttcacgacatccagcaaatccattgaatccattctgttatcaggaaggttcagcctgacaaaatcatggatgcccagagtgctgagcgcctgttccgtttcttgatgggaatgctccataacggactcttccggcttttcataatcggtttttcttgatgatttgccttccgccataatgaccgccgacacgctgtcaccctggcggacatgtttggcgagcgtgccgccgacgccgataatttcatcgtcgggatgcgctgcaaataccattactttcatcatattgccctcctttgactaacatttcagctgtatccgcaccgcagttcatcagcatatcaagcacggagaggtgagggatatgctccccgaataattgaggatagccaaaatgtctgatctgctgatactcaatgacaataccgtttctttcaaaatcgctttctattaaatagtcggaaccctgactgcctgaataataacgatccgccccaagctcctgacaaagcgctaaaacaaaatcgctttttttctccttccggcattcaagctctgaaacataacacatcggcgtttcaatacggagctcttttcggaaaaattcaataatgtgcatattcagatcatggagatattcccactcccgctgatagacatcctgaaaaaaatgctggtagcgctcaaaatagggggctttcgcataattcattttaattgccatccaatgttttttctgccaatcctgtgtctgatcgattttcatgttccgaagctctatgtctttatactgtttcatctgtaaaggcaccgtcagccatctggggccttgcggcgttttgattctgttgcggttgagaaatccttttttttcaaattgagctgtgtcatgaatggcaaacagatccgacttatacattttttcaaaaaaaccgtaccatggcagataactggattgatggccgcttattgttttcattccgttttcgcaaaaagtcggcattgtttttcttcagctccccaatatcgtttcggtctcgcgatttctttactgtgtgaatagccaaaatcagcccattgaagcttgcggcaaatggcgaattgcagggcgtcgcgcatcaataagtaagaggcctgcgctttttttcccgccgggctgtttacattctgccaataatagaaatgggagcggtcatagagaaaaatactgctgctgatcagtgtttcctcctgatatgcccctatccaaaacatccggtctgaaaataggtcaagcagcttttggaaaaagccttcactcaggacataagccgcgccgattgccgccgtatgttctttgtagagttcataaaacgctccaagttcttttcgcccgatcagacgggtgaccgtgttctctttttcagcgtacctgactgccgtccgggcttttccggaaatgcccgtccaaagttcgtcaaacgtgtccggaagcgtaaggatctgtgtcgccttctccgtccacgcttctccgctttcttctgtaaaagaagtctgaccgtacggaagcagcatccgggatatgttccggccgaatatggccttgatttcactttgaagccatgcaaatgagatggggcggtctgaaataacgccgccgtatccgatcatattgccggataatacgcccttctgttcaaaaagcggaagatagatgacttgtccaccgtccgttgtcagtctgacagggtgaaatgacgtgccgggaagctcttccatgagaattccccaatcatagctttgaaacaatcccgcctgatacatgtcagcggctcgatcccatgcctcgcgggtcgtgcatactgctgttttttgcatagttatcaccactattcagtcttattcttttgttcacaatatgataaaacggattcggctatatatctgatttgctcttggcgcagaggcggtttaaacggcagagaaagaactcttttccaaagcggatcttcctctccatctcccgcatatgtttcataaatcggaatacgttcgagaggaagatagttccagcatgtttggatgcctctttcagctaaataaacggaacacccataccgctcttcatcccggggaaatacgatcgttaaataattcagatgttctccttcttgaggctggatcattcttatgccgtatgtctcttccgcctttgcaaagatttctcctgccgcctccacgttttggagtgaagctgttacgagctgatccatacgtgaaagctgatcgtcaattatggcttcccttgccggatgcatgcgcagcaccggtacaacagccggtttatccggcagtgcttcgagctttgtggctttcatggaaggcatcacgcccgcttttctataaagatatgaaatgggatgatgccgtttccgtttcataacagcttgtattctttgatttctgatatagaagcgatagtcagccgtcacttggctgcgccgttccatcgggggatttgcgttttgctgcagcaattctttcggcgcaattaacgcgccgcctccgatactcgcaagcggctttgacggaccaaagcttaaaacgccgaaatcacccagaccgccggcaaatgtatccgattgttttgtaaacatggcttgagcggcatcatcaatgacaacaattccgttttccttcgcccagtcaatgattgcggtattttctctccggccgtatacatgcgtgaggataatcgcacaagtctgtcgcgtcgctttttttttgacatcctcgaacgataaggaaagatgctcatccagctgcgcaaaaacaggcgccgcaccggattgcagcacggcatcaatgacattcgggcagctgaaggatgagaaaatcacttcttttccccgcccagctcccgaataagttaatgcgagcaccagtgccgcactcccgctggaggtcagcacaaccccttttccgtaacgtttttccagtttttcagtcagtccgctttgttcagcccaaagcaagtgtttcactgcgcgcagacggctcctgactgaaaactggcccggataaattggatatttgacctcttccgggtttttaggaaagtgaaagtttgtgcttttgtctttcatctttaatgatctccaggccttcattcagacttactttcggagaatatccaagcaaacgtttcgccttctcgattgacggcgcccgtttaaaaatctcgatgtcttttcctcttacgccgtcttcaccgagcttcttaaacagatagttatccttctctctgcctgagagcacattgactttctcagccagttcttttatcgtgatcggctggtcgttcccgatattgaagtcttcaaagacggctccttcatgaacgagcgcgagataagttccgttgacgatatcactgatatagctgaagcagcgtatttgtccgccgtctccgtaaagaggcagctctgagccattctcggccagactgaaaaacttgtttatgacaaaatcctcgcgctgtttcggtccgtatacattaaagtaccggacgacccgaatatgaagtttatcggaagcttgttctcttaaatattcctctgattgcagtttggcttttccgtaagccgatttcggaagctttctgcttgtctcggtataaggaaaatcaggtgaatctccgaacacttctgagctcgatgagaaaagaagtgtgctgattcccaattcaccgcatacctcggcgacgtttttcgttccttcaaaattgacccgtatgacgtcttcttcattgcttcggcagctgtccactccgaccattgccgccaaatggacaaccgcatccgctcccctcagtgattcgcgcagcgacgtccggtcaagaatatccgtgtggcggtattcagtgtcaaaagccggcttcttttggtctgcaataatggtgtgataccctttagtctgtaataacgccgccagttcgcttccgataaaaccggcccctccgataatcgcaatattcttcatgatccaacctcctggctgatagtcaaaacttcttttatagacttaacaatatagctgcaatcctcatctgataactggctgtaaagaggcagtgatacgatctcccggaaaacacgttcagttaccggaagctcagcaggaaaatgttttttatagtaaggatgcatatgcacgggaataaagtgcacgctcagcccgatttgtttttctttcattttctcaataaacagatctctgtccatgccgccgttttctcgaatccgtaaaataaataaatgccatgagtgcgttatgccgtttggaatgtcagaaagcggaagcgctgctttgtcagcttggcctgacagttcacggacataaaattgagcgatctgttcccgtttttcttgaatttcatttgcgcgtttcaattgaaccagaccgagtgcggcctgaatatccgtcatattatatttaaaacccggcagtaaaacgtcgtatctccagctgcctttttcaccgtaccggttccaggcattttttgtgatgccgtgccagccgtacagcctcgctctttctgcggcctgttcgtctttcatgacgagggctccgccttcccccgtcgtaatatttttggtagcgtaaaagctgaagcacaccgcatcgccgtgggtgccgatcatacttccgttatattttgtaccgagcgcatgagcggcgtcttcaatcaggtataatccgtgttctttacaaatggactgcaagttttccagatcagccggatagccggcaaaatgaaccgcaattaccgcttttgtgcgcggcgttattttcttcctgacatcttcaggatctgcacacagacttttctcgcatatatccgcaaacacaggaacggctccggcgtgcaggatgacattgacactggaacagaacgtgaagctcggcacgatgacttcatcgccttctcccacaccgagcgccaataaagccatgtgtaatgcagcggttcctgaattacagctgatgacgtgttcggctcctatacattctcccagctttttttcaaaatctattaccttcgggcctttcgaaatccatcccgattgaattgtttcggtgacgcttgcgatttcttcgcttgtcatatcaggtctgtgaaaagagataaatcgattactaatgaccgttcactcctataaagtgacaactctgcaattgtcggctgatttttccctgcatacatttcttgtgtcaaagataatcggtgaggcatccttcaaaatactgtagtcaatcacatcgtggtctgtatgaatgatgatgacgtcgtattgattgatttgttcttttgtgaaagggacagattgtttgcggcttccgtcattcaagctgatcttgctgataaacggatcatgataatcaatcgtgcatcccttgcccatcaattcttccattatcgtaaacactgaggattcacgcggatcatttgtattttttttataggcggctcctattattaaaatgctgcatttgtctttgcccgccagtttcagggcatagtcagagacagaaatcggcatgttagaattgatttcgtctgccagatcaattaattttgtctgcagccctttttcattcgcaatccatttgaagtaaaaaggatcaatcgggatacaatggcctccgaccccggggcccgggataaatttttgaaagccgaacggcttcgtgtccgccgcgcagatgacttcccatatatcaatgtcgagttcacggcaattaagcgccatttcattgatgagagctatattgacataacgataggtattctctaggagtttagctgtttcagctacttcgggtgaggtgaccgggtgaatgctggtaacgatggtgctgtaaaacgctgaggcgagttctgtgcaagtctgtgtaatcccgccgactactttaggaatatctgatacttcatattgactgttgcccggatcgattctttccggtgaataagccgtaaaaaagtctgttcctatttccatgcggcggcttgatgccattctttcggcaatcttttttttcgttgttccagggtaggtggtgctttctaaaattaaaagctgatgctgtcgtccataagcgatcatgctgtcaactgcactgtcgatgtaggataaatcggggatcttgtcttttttgtccaggggtgtcggcacacatatcacaatgatgtcacatttttggataagcgacatgtcggcactgacttgaaatcgttttgtttgtaaagcagagttcagtctgtcgtcctctatatcttgaatatggctgcttccggcggctaacaaggaaaccttttcactgtttttgtcgaatccgataacattgtatcctttatcaacacattccagtgcaagaggaaatcccacatatcccatgcctaacacgcctacaatcgcctgcttcgtttcaatcagatgtaacagccgtttttgaccaaggttgctggcttcttttgtgacagtattcatttttcgccccctaatagatagaaaagagtattattttttacaatttaatacaaatatcgatcgatatcgcaattataacaaaagttaaaatttgttgaatgggttttacatccttttataaattaggtattatatatttatttttcctttattcataaaataaaatcctattaaatggtacatatttggtaacaagtgagaaaatctcccctaattgagagaatatacagaaaacaatataaaaaaacaggccgcagcctgtttttttattctttcacagcctcagttacagctccggtaacgagtgctcccgctttctctaatcgttctttgctgatatgtttcatattatcattctcggtgtgataccagggccccggctcatgtgtatcggggctgagccaaatccagttagccgacggaattcccgcttcataaaaagagacgtggtctgagtaaccgagctgaatcaggcttggcttgaccagccgggattgttcagcggctttttcagcataccggacactcggattttccctgccgtcaggagtggtgacacacatttggctcgcttctttccagtcagtcgcaatcatatcggcattaaaattggcctggctgtgctttctttcatctttcgtaagtgtactgacgtaataagatgaacccgcagaccataattcttctgcaccgaacaggataaagcggatttctttatctttcggtatgtgtgtaaactgcttgcttatttccagaacggcagatgtgcctgaggcgttatcgtccgctccgggcgctccttttacgctgtcataatgcgctgtgacataaataatatcagcatcagaagggttggcctgtgccgctttgcgagttcctatgatattttgtgaggtacggtttttataattcttaaattgaatgactgcctgcttttcccgcagcaatgcttcaccgtcttcttttttcataccggccgccggtattgttattcctttcccgctatgcgggcggacagcaagcggttttgttgcctgattataaataataactgcattggctcccgcttgttcggcatgttttatcttttgcgaaatggggatcttcccctcacggattactgcaatctttccttttgctcccgttacgtcatcgcgtaatccgaggccgccgtcaaagatcgcgccctctattctcagctctttttcaacagcagattgatcagcggagcgaagcgggaattcatgctctcctgctgtgactgaacctgaaaaatactttttcaattgaaatgtctgtacttggacagcggcgccttgagccctcaggcgattcgatatgtattcagccgcttccttttctttcgcagttcccgtttccctcggcccgatggtttcactcagagcatgcatggtgtccaatgcctcgtcagtatcaaaaaccggcgccttcactgttgaatgagcatgggtttcggacagcggtccggcagacgcgccccatataacacttgctgccaccgcagctgatataaatgaaaatttcatcaaaatccctcctcttattacacctcttcctttcgattgatggacaatgattcctttaaaaaggaaaaaaatgaatattattaaccaaatgaaaatgatgaaaaaggagggaaaagtccgaaggcataaaaaaagccgggagaatatctcccggcattctttcattacttattcaagttatagaaagagttgataccgtggtattgagcagtttcagccaactgatcttcgatgcgaagaagctggttgtatttcgcaacacggtccgtacgtgacggagcacctgttttgatttgtcctgcgtttgttgccacagcgatgtcagcgattgtgctgtcttcagtttcaccagaacggtgagagataacggcagtgtagcccgcgcgtttcgccatttcgatcgcatcgaatgtttcagtcaatgtaccgatttggtttactttgatcaggatagagttgcctacgccgtttttgataccttcagcaagctttttcgtgtttgtaacgaaaaggtcgtcaccgacaagctgaacttttttgccaagacgctctgtaagaagtttatgtccttcccagtcgttttcgtcaagtccgtcttcgatagagatgattgggtatttagaaaccatttcttcataccagtcaaccatttcagcagatgttttcacaacgccttcgccagacagatggtatttgccgtcttctttgttgtagaactcagaagatgcagcatccatagcaagtttcacttcttcgccaggtttgaagccggctttttcgattgcttcaacgattgtttgaagcgcttcttcgttagaaccaaggttcggagcgaatccgccttcgtcacctacagctgtgttcattcctttagcagaaagaactgatttcaggctgtggaagatttgagcgcccatgcgaagcgcttcacggaagttaggcgcgcctacaggcataatcatgaattcttgaatgtctacgttgttgtcagcatgctctccgccgtttacgatgttcatcatcggtacaggaagcgtttttgagttgaagcctccaaggtactgataaagaggaatctgtaagaaatcagcagcagcgcgcgcacaagccatagatacgccaaggattgcgttcgcaccgagtttgcctttgttttcagttccgtcaagctcgatcaaaagctgatcgattgcgttttgttctgttacgtcaaagccgagaagctctggagaaatgatttcgtttacgttgttaacagcagttaacacgccttttccaaggtaacggtctttgtcgccgtcacgaagctcaaccgcttcgtattcacctgtagaagctccgcttggcactaatgcgcggccaaaagctcctgtttctgtatatacttcaacttcaactgtcgggttgccgcgggagtcaaggacttcgcgtgcataaacatcaacaatgtatggcatgagtttgtctctccttttgatttacgcttatttttgaattaaagatgttccggtcatttctttcggtttttcaacaccgagaaggtctaataacgttggtgcgaggtcgcctaggattccgccttcgcgcagcgtcacgccttctttcgtcacaatgacagggactgggtttgtcgtatgggcagtgtgcggttcgcctgtttctgtaatcagaatgtctgcattaccgtgatcagcggtaatgatggcgtggccgcctttagcgatgatggcgtcaaccacttcgcctaagcattcgtccactgcttcaattgctttaattgtcggttcgaccattccggagtggccgaccatgtcagggtttgcaaagttcaggatgatcgcgtcgtgcttgtcagccgcgatttcttttacaagagcatccttcacttcatacgcgctcatttcaggcttcaggtcatatgttgcgaccttcggcgagttaatgaggatgcgctcttcgcccgggaattcttcttcgcggccgccgctcataaagaacgtaacgtgcggatacttttcagtttccgcaatgcgaagctgttttaacccgtgctgtgctaatacttcaccgaccgtattatcaaggtttaccggtttaaaagccacatatccgtcaacagattcactgaagtgagtcaggcagacgaaatgcaggtttttcggatgattttcaccgcggtcgaaatcgcggaaatctttgttggtaaacgtgttcgaaatctggatggcgcggtcaggtctgaaattatagaaaattacagaatcgccgtcatgaattttcgcaacaggttcgccgttttcttttgtgatgacggacggaatgacgaattcatcatgaatgccgttcgcataagaatcgtccactacatccattgcgctcttgtaagacgggccttcgccgtaagccattgcgcggtacgctttttccacacggtcccagcgtttgtcgcggtccatggagtagtagcgtccggaaatgctggcgatttcgccgacaccgatttcttcgatttgctcattcagctgctgaatgtaagttttcgctgtttgcggacctacatcgcggccgtcgaggaaaccgtgaatatacaccttcgtcagcccttcacttttcgcaagcttcagcagcgcgaataaatgattgatatgactgtgtacgcctccgtcagaaagaagaccgaacaggtgcagcgctttgtcgttgtccttcgcgtttttgatggcgtcaaggaacgtttgattgcgttcgaattcaccttcgcggatggcaacgttcacgcgtgttaagctttggtacacaatacgtccggcgccgatattcaaatgtccgacttcagagttccccatctgtccttcaggcagtccgactgcttcgcctgatgccgtcagcgtctgatgagggtattggttccaataacggtcgaaattcggttttttcgcttgtgcgactgcgtttccgactgtttcattgcgtaatccgaacccatcaagaatgatgagtgcagctggttttttactcatattgaccttcctccaataattgaacgaatgactgcggttcaaggcttgcgccgccgaccaaagcaccgtcaatatcggactctgccatatattctttaatatttgcaggttttacgctgccgccgtattgaatgcggagcttgtcagcagcttcttggctgaagctttcagcaacaactttgcggatatgcgcgcagacgtcgtttgcatctttcgctgtagaagatttgcctgttccgattgcccagattggctcgtacgcaataacggaagctgcaacttgctcttcagaaagacccgcaagaccttttttcacttgatcggcaacaagatcatttgtttttccggcttcgcgctcttcaagcgtttcacctacgcaaatgatcggcacaatgccgtgtttgaaagcggcatgcgcttttttgttaactgtttcatcagtttcagcgaacatttcacggcgctcagagtggccgatgacgcagtaatccacgccaaggtctttcagagcgaccgggctgatttcgcctgtgaacgcaccgttttcttcaaaatgcatgttttgggcgccgacttttaagtcagttcctttaacagcagaagtcagcttttctaagaaaagagctggtgcgcaaacaacggcttccgctttgtctgctgctggaatggaatttttcacttcttcaacgaagctgacagcctcgccgagagttttgttcattttccagttaccggctataattggttttctcatctgttccacttccttatagcagtttttatttatcgttcagtgcagctacaccaggaagctctttgccttccatgaattcaagagatgcgccgccgcctgtagagatatggctcattttatcagcaaggccgaatttttcaacggctgccgcagagtctcctccgccgatgacagagtatgtatctttcgcctctgccaatgcttccgcaaccgcttttgttccttgagcgaacaagtcgatttcgaatacgcccatcggtccgttccacacgacaagtttgctgtttttgataacgtcagcatacgtttcgcgtgttttcgtaccaatgtcgattgcttctaaatcactagggatttcagagatcggcaccattttcacgtttgcatcgttagagaaatcgtctgcaacgagcacatcttcaggcatatagaatttcacgcctttttctttcgcgcggtccatgaatgattttgcaagctcgattttatcttcttcaagcaaagatttaccgatttcgtatccaagggcttttacgaatgtgtaagcaagacctccgccgataatcaggttgtccactttatcaagcagactttcgattacgccgattttgtcttttactttcgctccgccgatgatcgccgtaaacgggcgctcaggatttgtcacggctttgccgagaacgtcaagctctttttccatcaggaatcctgcaaccgccggcagatgctcggcaattccggctgtagatgcgtgagcacggtgggcagcaccgaatgcgtcattgacatatacatccgcaagctcagcaaatgcttttgcaagctcaggatcatttttctcttcaccagggtagaaacgtacgttttccaatacaagaacgtctccgtccttcatatcggaaatttgtgcttttacagcatctccgtaagcttcatccgcttttttcacttctttgccaagcagttcgcctaagcgcgcagcgacaggagttaaacgaagctcctcaaccacttcacctttcgggcggcctaggtggctcgcaagaaggactttcgcgccttggtctgcaaggtgtttgattgttggaagcgcagcgcggatacgagtatcgtctgttacttccccgtctttcattggaacgttaaagtcaacgcggcagaatacgactttgccttttacgtcgatgtcttttactgttttcttattcatgccttaggagatcctccttcaaaatggtttgcatagcacgaaaaacgtgaaacgtgaaaccgcctcatgatgcttccgccgcggggcagattgcagcttctcggcacggggcagatcgtcttctgagccagggcaggcggccccgaaaacgaaagtgccgcggaaactgcaaaacgcggacgttctgcagcaatccggcgctttctgaaagccggtcctcatggaaaaagggaaagggagtccgtccccttcccttgtccgctttcattatagcgtttctgtccgaaagaaccaagtccggccctttccgggagctatgaattaaagaccttgttttgcgatgtaagctgcaaggtcaacaacgcggttagaatagccgctttcgttatcgtaccaagagattacttttaccatgctgccttccataaccattgtagaaagagcatcgattgtagaagagttagcattgccgttgtagtctccggatactaatggctcttcgctgtagccaaggattcctttaaggtcgccttcagccgcttctttaagagctgcgtttacgtcttcagccgttacgtctttgttcagttcagcaactaagtcaacaagagaaacgtttggagtcggcacacgcatagctccgccgttcagtttgcctttcagttcaggaagaacgagggaaactgctttagcagcaccagttgatgtaggaatgatgttttcagctgctgcacgcgcacgacggtagtctttgtgcggaagatcaagaatttgctgatcgtttgtgtaagagtgaacagttgtcatcataccgcgtttgatgccgaatttgtcgttaagtacttttgcaaacggcgcaaggcagtttgttgtgcaagatgcgttagagataacatggtggttagccgcatcgtatttgtcttcgttaacacccataacgattgtgatatcttcttcgttagcaggtgcagagatgataacttttttcgcgccagcttctaaatgtttcgcagcgtctgcgcgttttgtgaagaaaccagtagattcaactacgatttcaacgccttgtttgccccagctgagtttcgcaggatcgcgctcagcagaaacttcgattgttttgccgttaacaacaaggttgctgccgtcaactttaacttctgcgtctaattttccgtgtacggaatcatattgtaaaagatgagcaagcatgttagcgtctgttaaatcgttaaccgctactacctcaacttcaggattgtttaatgctgcgcggaatacgttacgtccaatacgaccaaaaccgttaataccgacttttactgccatgattgtttcctcctttaaataagtgagagatatttatattgagggacttttatcccttaataacttctttgcggctccttcgtccgtgacgagaaccgtgtttcgctgctttttaaaataagcttcaattgcttctgcttttgatgatccgcccgctactgcgataatgtcgggaatggcgccgagatcatcgagctgcattccgactgaatgcactttgtgaacgacttctccgtccgcattaaagtagtagccgaatgcctctgtcaccgcatgattgtcatctattttcttcaaatcttccaaaggcgtgtttcttcgttccgccattgttctagcttcgccgattccgtgaacgagcatactcgctgatttaatcgtgtgaagcacctcttttacggaaggctcttcaataatagatgagtaggcgccttgtgacagctgtccgggaacaaacaaaagccggtaagtgcctgaagctttttccgccatatgcgcgcatatggtgttcgcctgatttttgacgttttcacctaaaccgcctcttgcaggcacaaacaggagctcgcggttttttgaatccggcgtcatcatatcggcgacagcttcaattgtcgtaccgccggttacagcgacgatatttttgcctgaaaatctctttttcatacatgcgacggccgctctccctaattcttttttgacccaaggagattggtcgctgtctccggaaacgataatggcgtctttcagattaagacgttcctttaatgtcttttccaaaagcgtcaatcctaaaacatccttcatcgtatcttccagaatcgaaagcagtgaatagccctcttccgtcagtgtcatgccgtttgtttttatatcgatgagattctgttctttcaaaaactgaacctcgcttctgagaacgcgctcggtcaatccgagactggctgcaaggcttctgcggccgatcggttcagtaagcctgatatactgcaagatttcaaatcttttctgcatcacaagcaaaagatcaggcaataattttttttgagcttgtattaactggttcatgactcaaacgttccttcctattcatactggacagaaaatgtcccgctatgacaaaaaacgtcccatcatagccaaaaaaaattatgtctgctttctttaattattttaacaggctgacattgttaattcaactgttaaaggtcaattcctcgacattcttcgcaacatttaccagtatctccttgatacagtcattatatacagaaacggaatgaaggtgacagacaaaagcccgccggagcgggattttgtcgtaaaacgctttcattttatccagagcttttctatttcttctaatgatttatttttcgtctcagggcagatcgtcacgacgaacaagaaacagagaatattaatgacggcgaatatccagaaggtgtacgcaagacccagcccgctgatcatcatcggcacaaactggccgatcgcccaattcgccccccataagaatattgttgcaataccggcggcgcgtgcacggaggtgattcgggaagatttctgaaatcatgatccacgtaatcggccccactgatacacagaaagcggcgacgaatcccaatataatgacgactaaagccgtcccgctcgccagatgaaaataaaaggatgccccgattaagatcataaacagcgccataaaggcagatccgacccccatcagctttttccggcctactttatcgactaaaagaaccgcgataacggtgaaaatcacttcgacgacaccgacgatgcatgtcgtgacaaaccctgcattctgcccgaagcccatcattttaaagatttccggcccgtaatacgtaatcgcgttcataccgatgacctgattgaacaaagccagcagaatcccgatcacaagcgcttttctcagccccggtttaaacagctgagataatgaacccattttttctaattgtaaagacgtttcgatttgtttgatttcttctttcgcagtctgttcgccgtttatacgcgtcagcacggcgagggcttcattccggcgccccgcttttgcaagccagcgcggactttccggcacgagaaacagcacgataaaaaagatgacggacggaatcattccgtaagcgagcatccaccgccagccggtatgcactccccattcatatgaaccggattgctggacggcaaggttaataaaataagtgccggagatgcccaatatcgtaaatagctgatacagtgaagacagactgccgcggatgggcggcggggcggcttcggtaatataggtgacagaaagcgaggagcccatcccgattcccagaccgccgataattctggcgataattaaggaagacacgctttgagaaagcgcagagacaaccgctgacaccgcaaacaaaagcgctgctgccatcaggatctttctccgtccgaaacggtcgctcaaaaatccggaaataccgacaccgaaaacaccgccgatcataatgcttgaaatcacgagcccttccataaaaggacttaagcggtacaagtctttcaaaaaaccgatcgcgccggaaatcaccgccgtgtcataaccgtacaaaagccctccaagtccggccgcacatgagatgagaatgacaaaccacatggaatgctgccgagtgactggtacatgtgaaccaattggtgccgggtgattcttcatgaattttaccctcccgcgtataatagaataaaaacgcttacaaatcagagtgccggcgtttggtttgactttggtttacttcgccgtcacatttgtacgtacttataaagaattttatctaaaaataaggaaaattagtacgtacaaataaagaataagcagtttttcataatctgtcaattatttttgacgcttgatgaaagggcttactatgttatacttgaatttgtccgtatacattttggaggaattgatatgctaccgaaatatgctcaagtaaaagaagaaatttgttcttggctgaatcaagggaagatacagccggatcaaaagctgcctacggaaaatgagctgatgcagcagttcggcgtcagccgccatactatcagaaaagcgatcggggatttggtctcgcaaggactgctgtacagcgttcagggcggaggcacctttgtcgcttcacgcacggcgaaatcagccatgcattcaaacaaaacgatcggcgttattacaacgtacatatcagactatattttcccgagcatcatcaggggaatcgaatcttatttaagcgaacagggctattccatgcttctgacgagcaccaacaacaatacagaaagtgaacggcggggccttgaaaacctgctgtccaaaaatatagacgggctgattgtcgagcccacaaaaagcgcgcttcagacgcccaatatcggctactatctcaatctggagaaaaacggcattccgtttgccatgattaacgcctcttatgcggagctggccgcaccgagcttttccgtcaatgatgtcaaaggcggcatgatggcttgcgaatacgttatgtcactcggccacacgcacattatgggaatctttaaagccgatgacacgcagggcgtcaaacggatgaacggctaccttcaggcacatcgggaacgcgggatttttccatcgccggacatgatcgtgacttacacgactgaagaaaaagaaaccgtgcttctcgagaaaatgaagcatactcttgagcagaacagcgggtcacatccgacggccattctttgttacaatgacgaaattgcgctgaagacgattaatcttctcagagaactcggtttgagagtccctgatgatgtgtcagtcatgggctatgatgattcacatttcgcccagatttccgaggtgaagcttacctctgtcaagcatccgaaatcaattatggggaaagcggcggcaaaatacgtcatcgacagcttagaacataaaaaaccgaagcgggatgacgtcgtgtacgaaccggaactcgttatccggaattccgtaaagcgaatcgacgaataaaaaaagcaatgtgcacggcacattgcttttttgctcagctgttttttaattcagcaataatttcaaacgaccgcattctgtcggcatgctcaaagctttcagaattcaccatgatttcatccgcctgtgttgtccggatgaagctttccagcttttccttcacacgatcaggtccgccgacgatcgttgaactgagctgttcattgaccatcgctttttcatacggcgaccagatttgatccatgtcttcaacaggaggtttcagctgattcggtgtaccgcgtacgaggtctaaaaatctttgataatgcgatgtcgccagatgctccgccttttcatccgtatccgcggcaatgacggtgacgccgaccatcgcgtacggtttatccagtacgtctgacgggcggaaggagcttcggtacatctcaagggcgggcacggtgtttttcggtgagaagtgagccgcaaaggcgaacggaagcccgagctcacccgcaagacgcgcgctgaagccgcttgagcccaaaagccagatcggcacgtccagcccttcgcctggaatggcgcggacttgattacgcacattgcctgacggtttaaagtaatttctcaattcttcaagctgctccggaaaatcttctccgctgtttatatttcttcttaaagctctcgccgttaattggtcggttcccggagcgcgtccgagcccgaggtcaatccgccccggatataacgtttcaagggttccgaattgctccgcgatcacaagcgacgagtggttcggcagcataatgccgcctgaaccgacgcggatttttttcgtgccgccggcaatgtggccgatcagcactgacgttgccgagctggcaactccttctatattatgatgctccgccagccagtagcggttatagccccactcctcggcgcggcgcgctaaatccatgctgttgcggaacgattcagcaaccgttcccccctgtacgaccggcgataaattcaatacggaaaacgcagtatctttcaatgtatgttcagccatcgttttctcctttatggtttagtgtaagcagatcttaaacaaggtctctaccacacaccttaccacagcttttcccgtgagttaaacaatttgattcgatgatcttcgaacaatcagtcagcggcggttttcttacggatgaacagctcctcggcaatttcaataaaaagcttggcggcaagtgaggcgtcttttatagaaggaaccgccagctgcacctccctgaatacatccggggtaaactctttaatcaccacttcttccggaagaggattgccggccatagacatttccgataagattgccatgcctaacccctcccgcaccatattaatggatgtgctgacattaaaaacggtaaaggcggcgcaaagttcggcaccggcttgtttaaacaaaccggaaaaaggggacgtgtaaccgccgtcgcagaccaccatcggttcgccgtccagatcctttattgttacggttgagcgtgcggcgagagggtgatccctatgcataaccgctgccattttgtcttttttcaacaggaaataatccatatcctctgtcggaaaaagcaaaatgcccgcatcaatcatccgggattgcagccactccttcacttcgtccgccgttccttcatgcagcaccagttcaagcttcggataccgttttttaaacacgctgatcagctttggaatgaaataagcggaagcggccggaaatgtgccgatgtgaatcgttccctgttcaagccctctttccgcggccgccagctgctccgctttttctatgcctttgagcacctctctgatatgtacgagaatttttttgcccgtgtccgtgagccttaagccgttgcggcgttcccggatgatcagcttgatgccgagctccgtctcaagcgccgagatggcatgactgacggcgggctgcgtcatattcagcgcctgccctgcttttgtaaaacttcccgtttcagcaatttgaacaaaaacccgcagttgtgtaatcgtcataacgttttacttatgctccttataaaaaagattcattttatttatcttactgattaccgtatcatatgatggaattgttctacaaggagtgaacgacgtgaaacagctttcgagaatacagacggctctcatgctggcgtttttagtcacggtatgggggattaactggccgctgacaaaggcagcgctcgcctattcgccgccccttctgtttgccggaatccgcacgctgatcggcggactgctgctgttaatggttgcggtgccccgttttaaaaagctgcgttttaaagaaacgtggccgatctatcttatttctgctattttaaatatcactttattttacggcctgcaaacggtcggcttgaactacctgcccgccggcttattttcagccattgtgtttttccagccggtcttaatgggcgttttttcttggctgtggctcggggaaccgatgtttcctttgaaaatagccggtcttattctgggcttcgccggtgtcgccgtcatcagcgcagccggtttcggaggccatatttccatcgccggcattcttctggcattaggctctgcggtcagctgggcgctcggcacggtatttatgaaaagaacgggaggacgcgtggattccatctggatggtcgctcttcagcttctgatcggcggcgggctgcttgtcagctcaggcagtttttcggaaagcttttcagcgattcaatggaaagctccgttcattctcagccttctatttatttcggtatttgtcatcgcgctcggctggctcgtcttttttacgcttgtcggttcaggggaagcaagcaaggttgcctcttacaccttcctgatcccgctcatttccattgtcgtcagctcgattttcctgcatgagccgctgaccgtcagccttttggccggactgcttctgatcgtcacaagcatctgttttgtgaatataacaccgaagaaactgaaaacacctgctttggccgcagaaaaaaaggccgttcattaaaaaaactcttgccgcggggcaagagttttttatttattggcgtctccctttcacaagatacgcagccgtaatgagcagatagatggccgccgtgatgcatgtaatgacgattgatgtcgtggcaatcacgccgatcaggatggccaaaagcgcaagcaccgcgaaccatgtggtgtacgggaaccattttacgtaataagcgggctgttccgctgcatgttttcttgatttcagatgggcgaacccgataatcagccaaatgaacagcacggtatagcctagtgaccccatcaaataattaaacgtctggcttcctgcaaataaagaaatcagaacgcctacatataaaaacgacgtacatgtaagaatcgcataaacggggacctttttctttgatagttttgaaaagactttcggcacccggccgtcagaagcctgcgtaaacaagacgcgggatgatccgtacagtcccgagttcatggacgagataatcgcaagaagaatgacggcgttcataatatggtcggcacccggaattccgatcatcttaaatacgatgacaaacgggctttcgggaacgctgttaacttgattccaaggaatcaggctgacgatgatgaaaaacggcagcaagtaaaaagcgacaatccgcgttaacgtgctgcggacagctttcggaatcaccttttcaggattttttgtctccgccagcgtgacgccgatgatttccgttccgccgtatgagtagatcacaacgagcatcgccgtaatgacgccccccgctccatgcgggaaaaacccgccgtggttcgttagatgagacagccccggtgccgtgtgattgccgaatgagaaaaataacagcagaataccgcataaaataaagatgacaatcaccgtaattttaataagcgcgagccagtactctgtctcggcaaacagcttaacagaaagcatattaacgaccgtaacaacgatggaaatgattagagccaatatccatatcggacattccggcagccaatattgaataaaaattgcggctactaccgcttctgcggcaatattgagcacccacattttccaataaatccagtctaaaaagtatgcagcgtacgaaccgagagactgctgaaccaaatcacggaacgtccttgcatttttatttcggacagccatttcagccagcccctgcataataaacagcagaataattccgccgaggagataggccaataatacggacggcccggcttcatcaatcgccgtgctgctgcctttaaaaagcccggctccgatcgcgcctccaagcgccatcatcataatgtgtctggacgacatcgtccgttttaacgtttgcttgtccttttccatctatcacacgccctctcgcaaaaaattgttcatcacataaaaaagcacgccgcctctttttagaaaagagacggcgtgcctcaggcagccgcggtaccactcttgttgatcccgaatatccggaatccagcttttaaaccttttaacgaaggtcagccgttaggacatagggaatattccgacaattccgttccgccctgccacttccgggcgagttcaaagaacaatcagtccgcgttgcaccaccccgcggctctctttttctgactggattcttttactgctcccgttcacagtgttttatgttaaatgaatctcttgagtttttattttctgaatatagtaacataatatacagtcttctattttcaaagtcaatacataatttttgccgcttattgcccttccaagtcatttaaaaatctcagcagaaatccggaaaccgggctttgctttccgggtgccgcgctttccgcttttacctttgtatttgcgtataaaaacagggcaagcgcaatgccgaatgaaatgacgagaatccatgcttttttcatccagattcctcctcactttttatcatcggcggcctttctcttttttttatattttaaatcgaaaaaacaattttaaaattctgttttccttatattgaaacttgctttatcataaaagtatgcgtttacattcgagtaaggaggttatagcatgacccctgtcaattcaagcagcatcgggaagattcaggctgccagcaaaggcttgtcgccaaaattgagagcgattgcagaccatatcgtgaaggaaccgaaagacgtggttcacctctccatcattcagctggcggaaaaaacgaaaagctctgaagcgacgattttcaggctgtgcaagcgtctcggttttaccggctatcaggatttaaaaatcacgcttgctcaggagatcgttcaggagccggtacagcacattcatgaagaaatgagccccgatgacgatatcgaagtcatcattcagaaagttttccgcgcaaatatttccggcctgactgataccttccatttactagatccggccgatgttgaaaaggcggtagagatgattcacagcgcagacagaatcgaattttacggaaacggcggctccgggctgatcgccactgacgcgtatcataagtttatgcgtacgggcataaactgcatcgcgcatacggattctcactttcaggcgatgtcagcgggtcttctcggtcccggaagcgcggtcatcggcatttctcattcggggagcaacaaagatgtgctcgacgcagtgaaaacggccaaatcgctcggcgcaggaacgatcggcattacaagctatcaaaaatcgccgctcacccagatttccgacgttgtgctgtatacatcaacaagggagacggccttcagaacggaagcgatgtccgcaagactcgcccagctgacagtcattgatacactgtatttcgcaactgcccgtctgcggcaggagaaaacgctcgccaacttgcagaaaatcagaaaaatgatcgcgcacaaacgtttgtaatcgctttctgaatatttatttttcaaaagagaaatgccgatacagcgggaaatgaggcaattttatgaaaaaatttttcttcttcatcgttgatttataaaaaaattattcctataattgactttgtaagggcatacattatcaatctatcttattattcaattagattaggcgggatatatatgaaggaaacccaagctgttatcggtctggatatcggcacgaccagtacgaaagccgttctgttcggaccaagaggcaaagtgttagccaagcattcggttcactatgatttaatacagccaaagccggcatgggccgagcaggatcctgagcacattttggaagcggttatcggaagcatcaggggcgccgtcacaaaggccggactgagtcctgacaacctgcttgcaatcggtatcagcaccgccatgcactcattgattgctgtcgatcagcacggcggcctgctgaccaaaagcatcatttgggcggacaaccgcagcgctgagcaatcaaaacggattataaaagagatgaacggtttcgatatttataaaaggacgggtacaccgattcacccgatgtccccgctttccaaaattgtgtggatgagagagcaggataaggagacattcgcgaaaaccgccaaattcatcagtattaaggaatatattctgcacgagtttttcgggacatatgtcgtcgattattccattgcttcggcaacggggctgttccgtttagagacgctttcctgggatgaagaagcgctccggattgccggaatccgggaagatcagctgtcggacatcgtgccgaccactcatcagctgcgcggccttgcgccggaaatcgcggcacggatgggcattcatgcggataccccgtttgtcatcggcgcaaatgacggcgtgctcgcgaacctgggagtaggcgcgatcggcaaaggcgaggtagccgttacgatcggaacaagcggtgccgtgcgttcggtgacggatacgccgattacggatgaaaaagcgcggacgttctgttacgcgttgactgacaagcattgggtcatcggcggcccgacgaataacggaggcattatgctgcgctggcttcgtgatgaattcgcttctccggaagtcgaaacggcgaagcggctgggcgttgatccgtacgatttaatgattgatatcgcggataaagtgcccgcaggttctgagggattgctgtttctgccgtttttatcaggagagcgcgcgccgttttggaatccgaatgcccgcggaacgtttttcggcatcagcctccgccataaacgggagcattttatcagagcggtgctggaaggcgtcatcatgagcgtcttttcaatcggggtcgcactgagagatttggcgggtcccgcaaaagacgtgcgggcatcaggcggatttgcgaggtcgccgctgtggagacagattttgtccgatacgatggggcgggaagttctcgtaccggaaagttatgaagcctcggcgctcggagctgccgtcctcgctttacacagccttggcgaaatggaacggattgaggatgttcaggactggatcagaatttctcaccgccatgaaccaaatgtcaaaaacagcgaaacatatattgagctgttttacttatacgagcggctgtatgacaagctcaaagatgaatttgacgtcatcagtgaatttcagctcaaacaaagccgttaattcttctttgaaagggtgaaaaggtcatgttactgtttattgtcattgccgctattatcgttttactcttattgattacagtcgctaagttaaatccttttatcagtcttttgattacatccatccttgtcggtttcgcaacgggcatgcatcttccggacattatcacttcgatgaaaaccgggctcggcaatacgctgtctctgcttgcgatcgtgctggctctcggtacgatgctcggtaaaatgatggctgaatcagggggtgcggagcggatcgctcacaccctgatcggccgcttcggcaaaaagaaagtgcattgggcaatgatggccgttgcttttatcgtaggcatcccggtctttttccaggtcggcttcgtcctgctcgtgccgcttttgtttacgattgcgattgaaaccggcgtttcattagtgacgatcgggattccgctccttgcggggctttccgtcgtgcacggattggttccgccccacccggcggcgatggcggctgtcggcatttatcacgcaaatgtcggaaaaacgattttgtattctttaatcgtcggcattccgactgccatcatcgcggggccgctttacggaaaatggattggtaagcgcattcacaaacccgttcccgaacttttgaaaaaacaatttattgaacggaatgagaaacacaagcttcctggattcgcaaatacattgtttacgatattggtaccggtgatcctgatgcttatggcaacgcttgccgaaattgcgcttccggaaaaaagcacgctctatgaaacttttaaatttatcggcgatcctgtcacggcgcttttgatcgccacggtttactcctttttcagccttggtttttatcagggctttaacagagaaagcattttaaaattcagcaatgactgtctgggaccgatcgcttcaattctgcttgtgatcggagccggcggcgcttttaacaacgtcctgattgattcaggcgtcggcacttatatcgctgatctggcgaagcattcaagcttctctcccgttcttttaagctggacgatcgcggcagtcatacgcgtcgccacaggttcagcgactgtcgccatgatgacggcggccggcattgtcgcaccgattgcatctgtcatgccgggcgtcagcagcgagcttcttgttttagcaacaggagcgggttctttgattctgtctcatgtcaacgactccggtttctggcttattaaagaatacttcggaatgacggtgaaagaaacattcctgacatggacggcgatggaaacgattatttctgtcagtgcgatttgttttatcatgatcattaacgcgtttatataaaaacagcccccggactgaaccgggggttgtttttgttatcggtcattcacaaggatataagcagctttaacgggtccgtggacgccgacaaccaaatccatttcgatatcggccgagttgctcggtccggtaatatagttgatgcaggaaggaacagtgacgccgtctctgatctgctgtttcaatatatcactggcctgcgtcattctcggcacaatggaagatttcgggatgattgcgatataggtggtcggaagcaggctgacagaacggccggcatgctctgacgcatacaaaacgacggtggctgattccgcaagcgtgatctcgctgaatgtgatgcccacattcgcctgttccgctttttcaatatttttcgctccttgttccgcatcccattcccaaaccggaatcccttcatccggccactcttctgtcataaggctctgcaggccgtatgtttcaaaccggctgtctttcgggataatgacaggccccccttcaaagcgttccacctgcgtgcgcaaagcggcgtaaagcccggcggcatccgtttcgatcagctccgtatgaatgttgacacagtggtctttcagcatcatgacaaggtcatcttccgtacagtccgcgtgcgtttcatattgaggctgatacttccattcaggcagggacacgcctgattttctgcgctctctgcccaggctttcggcgatccggtttaaaaaggattcctgatgtttaaccgtccctttcatcatcattcttcctccttttgtgtttcccgatctttaaaccaatctcggaatctcgatttatgcggcgccgggaagtcccggactgttgtccatccctttaacggtcccggtccttttgatattttgtcatcttccgtaaacggcatcatggcggctggcgcccattttgatcccattttataaagggacggggatgatgagccgagcccgaaggctttcatggccagtttttcgctgaacggcgctttgccctctttttccacgatgttctgccggtgcttgagcagcagctcgtgcagcggaattttaacagggcacgcttccgtacaggccgcgcataaggaggatgcgtacggaagctccttatactcgtcatatccgccgagaagcggcgataagacggcgccgatcgggcccgaatagatggacccgtacgaatgcccgccgacatgccggtatacgggacagacattaatgcaggcggcgcagcggatacattgcagcactgattgaaattccgtgccgagtatgcgggaacgcccgttgtccacgaccactagatggaattcctccggtccgtcagcttctccctcccgccgggggcccgtcagcgccgtaatgtaacttgtaagccgctggccgacggcgcttctcgtcagcatgctgacgagcacttcaaactcagaaaatgaaggaacgatccgctccattcccattacggtaatctgcgtcttcggcagcgcggacacaaggcggccgtttccttcgtttgtcacgagactgaccgaaccggtatccgcgattgcaaagttgcagcccgtaataccgacgtccgcttcgagaaattttttccgaagaacgctgcgcgcgtgcataacgagctcttccggtttttcagtctgcttgtatccgagtctttctttaaacacgtcacggatctgctctttgtttttgtgaagggcgggagcaacgatgtgtgacggcgggtcgtgatcgtcaatctggagaatgtattcgccgagatccgtttctacgacttcacagccctcttcctcaagcacttcgttcatattgatttcttctgtcaccatggatttggatttcacgatttttttggcgtttttctgccgaatgacatcgcggatatatgaggacgcttcttccgccgtttcggcgaaaaagacgtgtccgcctcttttggcgacgttttcggcgagctgttccaaatagaaatcaagattgtccagcacatgctgcctgatttcttccgcatgcgaacgccaatcctcccagtttcccaattcctctgccgcctgaagccttcttgtcctgagccgctcctgcgctccggagacggctcctctcataaactcattatctattccttctgatacccgctctttaaaagcggcggtaccgattttcatcgccatgattttacccccctgttgtttctcgttatctgctgttcagcacttcggcgatgtgcatgactctgacgtttttttctttccggtcaagacgcccgccgatattcatcagacagccgcaatccgccccgatcagcacctctgcttccgtgtcttccacacaggcgaccttctcatccaccatttgttcggagatttgcgccattttcacggaaaacgttccgccgaatccgcagcattgatgttttccgggaagcggagtaaactcaagccccttcacatggcgcaaaagcttcatcggctcctccgacacgccgagcagccttgtcatgtggcacgatgtatgtaatgtcgcttttttatgcagcaccgcaccgacatcctccaccccgagaatattgacaataaaatctgttaactcatatgttttgtctgcaagctgctgcgcttttgccgcccacttcggatcgtcctgaaacagatgcggatagtcacggaacatcgtcgtacaggaacctgacggactgacgacgtactccgcttcctcaaacgcggcaatcatccgcttcatcgcttttttcgcatccgtcacatagccgctgttgtatgccggctgaccgcagcaaatctgcccttcgggaaaatccacctcacacccgagccgttccagcaattcaaccgtcgcctttccgacattggtctggaacatatccacaaggcacgtgacaaataatgagactttcatgatgaacccctctttcatcctcaatatattgatccggtcatctgatgacctgtttttgggaaagctctataaatatcctacactattctgaatatggattggaaggtttttctgaaaaatcctgttctccgatgcgctaagggcacaaaaaaagagaagcccgaaagcttctcatgctgctttacacctcattttccagcaggcgacccagcttttgcacacccttttttatcgcggctttacctgcataactgaacgacaggcggagatattccgcaccgtcttcctggttcagaaaaaaatattttccgggtacataggaaacgcctgaagaaagagcccgcgccagcagtgcggacgtatccgcacccggcactctcacccaaacaaaataaccgccgtccggcacgttccaagatgcggattccggaagatattgctctaatgcggcgagcaaaacgtcacgtttgctccggtatgcttcccgcaaggcggcgagccgttcttcaacatccgtttgttccagatagacggcggtcaccgcttgagaaaatggatggtccaagtcttttttaaaccatgacaaagccttgatgaaagcagcgttccctgcaatccagccgatcctcatacccggggcgatgacttttgataatgaaccggcgtacagcacccggccgttatgatccatggccttcaaaggcggcgggatatcggtgaatcccagctctccgtatgcatcatcctccaagatgagaaaatcatacgtttcagccagctgaagcaggcgggttctccgctttgctgacatcacggttcccgcaggattctgaaaagcggggatcgtgtacagaagacggggaagcacaagccctttgcgttttctttcctcaagcatgagggctaatgtttctgtttgcaggccctcttgatctgccggaatgctcatcatatgcggtgtgtaatttttaaaaatctcaagcgcctccatgtaggcaggagcttcaacggcagcggcggtttgttcatcgagaaaaacccgggcagccagatctatcgcctgacaggcgcctgaggtcacgatcagctcatcgtcccggcagtgaatgccgcggacggctaatcgtttttgaatctgcttttttaaaacggccggcctcggacttcccatataatgcagcggcagatcgcgttcctcatccagaaggcgggatgcggcttctttcagctccttatctggaacgagtgcgggatcgggatagccggaatgcagagggatgcacgctttcggaacatccggcatccattccccgggaggatcgtttgtaagggctttctttacatggtcagaaaaaaaagattcggcctgcatgtgatcttatcccctttcacaagtcagcttttatacattttcttcaaaataagcccccagcacttcttccacattcgtcaggtgcgccgtcatcgcggcttccgcttcatccgcgtctccggcggcgacggcgctgtaaatgcgttcatgctcttcatataatcttttcacgctcgtttgtttagaaaacagccaaatctttctcgtttctctcatcgtttccaaaagcagcgcggagacatgattcatgagatgcttgagcagaccgttttgtgatgcttccgccagcgccatatgaaaggagaaatctgctttttcccccaattcttcgtctccgtcgatgtctttcatctccatgagagcttggcggattttctgtaaatcttcttctgttcgtttttcagcggccatggcggcgacacccaattcaagcagctttctgacttcgagcagctgtttgacgtcctcttttttcattaagagggcggaagaaagcggctgggaaatatgggccggttcaaattcttttatgtatgtgccttctccctgtttcatgtcgacgagccccatcgctttcaaagctgacagcgcttctctgactgccgagcggctgacctgaaaactctcagaaagcgcctgaacggaatcaagcttttcacccggcttaagctcgcccgcttttatcttctcaagcaatgcatcagcgacttcttcgtagatttttttcgttttaatttgtttatatttcaacgcgatcaccccgtcacttgtgaatcttgatgtttatcgtctattatacttcttttttcgagccgccgacaggttcagacaatttgtttcagaaaagtattgtattttcaaaaccttcaaaatataatgctaattaacccggtcatcagatgaccttatcataaaaagtaatcgtttacatgtcataaggaggggtttttagggatgcaatggacacaggggtatgctcctttagggggaaatttgcttttatcggcagcttgcgcgctcgtgccgattatcttctttttttgggcgctggcggtgaaacggatgaaggggtacatagcgggtcttttgacattagccgtttcacttttaatcgctgtatttgtttacggaatgccggcggaaaaagcggtgctgtccgcttcgcagggagcggtgtacgggctgcttccgatcggctggattatcatcacgtccgtctttttgtataaaatcaccgtgaaaacaggacaatttgagattatccgaagttcggtgctggcgattacagatgaccgccgtttacaagcgctgctcatcgccttttcattcggagcgtttttagaaggcgccgccggtttcggcgctcccgtcgcgatctcggccgctttgctcgtcggacttggttttcagccgctttatgcggcggggatctgcctgattgccaataccgcgcccgttgcctttggcgcgatcggcattccgattaccgccgtcgaaggtccgaccggaataccggctatggaaatttctcaaatggtcggccggcagctgccgtttttatccgtatttattccgctttatttaatcattttgatgagcggatttaaaaaggcttttgaagtctggccggccattcttgtttccggcgtctcctttgcggccgtgcagtacgcaagctcaaactttttagggcctgagctgcctgatgtgctgtcggcgcttgtgtccatggccgcgctcaccgtgtttttgaaattttggaaaccgaaaacggcctttcgtttcgcggcagaacgggaatcagccgcagccgctgacgtcacgccggccgtgtacgggggggctgcggtttttaaagcatggtctcctttccttcttctgacggccatgatatccgtttgggggattcccggcgtgaaggccgccttgaccggtcattacgaaggaacgtcaatatggctttcctggctgaatgcagccgggaaagcattgaccttcacgcctcccgtcccatttgtaaatcagcagattcttcaggctgacggcacgccgattgaagccgtgtacaagcttgaatttttcggttcagcgggcacggcgattctgattgcggccgtcatctccaagttcgcactcggcatgccgtggaagtcatggggcggggcatttatagaaaccataaaagaactagcgcttccgatcgtcaccatcgtatctgttgtcggctttgcttatgtcacgaatgcttccggcatgagcgcgacactcggtcttgcgcttgccatgactggcgcgatgtttacctttttttcgccggtgctcggctggctcggcgtgtttattaccggctctgatacgtcggccaatttattgttcggcggattgcaaaaggtgacggcgctctctgtcgggatggatccggttctctctgtcgccgccaattcatcaggcggcgtcaccggaaagatgatttctccccaatccattgcggtggcctgcgccgctgtcggtctggcaggcaaggaagcagagcttttccgcttcacgattaagcacagtctgtttttgcttttgctcgtctgcctcattacatttttacagcatcatctgttttcatggatgatcccctaacaaagagaacctccccgggaattggctcggggaggtttcagctgtatcgttttctcgccgatgacggcgggatatttaattggtcacggtatttggcgacggtgcgtcttgaaattcggatgtcatattgttcaagcagcaggtcggcaagcttttggtctgaaaaaggtttctttttgtcttctttacggaccaatgcttccaggtgtgcttttacggcatagtttgaggcgctgccgtctcccgatgattcagctttcgccgaaaaaaatgttttcatatcgtacagtccgtacggcgtctgcacgtactttcctttgatggcccggctgatcgttgattcatggagctccagcgtttccgccacctctcttaaggtcagcggctgcatgccgctttttcctgtgagaaaaaaggatgcctgccgttcagtcaggacgccgataattctcgtgatcgtttgttttctttgcgataaagcccggttcagccagcgccattcctgatattttgccgacagataatctttcgtgtcacggcatccggcggctgacagcatcggccgataatgggcatgaagctggatatccgggaacgaacggctgttgagccgcgcttgaatgatgccgtttttcaccgtgatgaaaatatccggttcaacgtaaaaacccggttcctcatgcgcataacggagccccggcctcgggtcaagcgcgctgatcatgtcaaagatgtcctgaatgtctttgagcggaatgcccgtttgcaatgtaagcgctttccagttctttcttgcaaaaagctcaaaataggcgccggcaatccattccgcctgttcgttccgctcgggcagacggcggagctgaagaaggatgcattcctgcaaagacctggcgccgattcccgcgggctcaagcgattgaagctttgccagaacggcttccgtctcctctagtgaagcggatacatggtcggcggcagcttgtatgtcctcttttaaatatccgttagaatccaaggaatatatcagataattaaaaattttcttttcagcatcggacagcttcatgtctatggcctgctgtttgagcgaatcctgcagcgttttgcgcgtaagcctgatctgctggcttacgtcctgttctttcatcctgtttttatttgttttatggtaagatagtggcggcgtgtctgtttcctttcgttcaatcagagggttttccagagagagctcatcaatatacccggccagttccgcggaattgtatccgagtaaagtgatggcctgtttaagctcttgagtcaattgaggctttaaaatttgtgtttgctgaagtttgatatccatcatgctcactccccttttttcattgtacatgattggtttcataccgtatatacttattaaaaggagttgctttatagatgtcagaacttttttctgttccttattttattgaaaactttacacagcatattgaaatgaatccgaatgaagaccgaattcatgcgatgaacagctattaccgctccgtcgtctcaacccttgtacaggatcagctgacgaaaaactcggttgtgctcaaaagaattcagcatttggatgaggcgtataacaaagtaaaacggggagaaacaaaataaaccttccgctcattcaaagcggaaggttttccttcgtgcctgcagtctcgatcagacggacgtccggcgcttcgtgtgtccaggtgtgataatagttggcgtttttcccgtatgaattatcaatgacagtattcggtttcccaagaagcgaggacaggatgtggccgtgaagccttgacgtttccgccgattcgtacttgctgaaaaaccggaccgcttttttcgtcaggaaatccgaatagaatttccaaaaccgcgcaatcggcagcaggtttcccgcttttttattcaggacattcagcgtctggaaaaaagcgattccccggcggtcgcttgctgacagcacatgctgccagtcgcagcttttaacggaatgattgttttgcagtttcggattgatttccccgtcagtgcggataaaatgaagcctgccgcgtgacggagccgctgccgtcttgatcggatacagctgatgggccatatcaggcagaagtccgatgtgattcgccgaaaaaaagcgtttcgcagtctcgtgtgacacatgatctctcgtaaacaggtgcagatccttgtgctccgcaaaaagcgccgctgtctttcgcagccgtgtttcatcctgataatagatggattggggcagaatgacgatcctgttttcgggaaaggctttgacgattttttctctgaacgtctgatagtacggatagagatccccgaaattcccgcctccctgacagacgatgatcgtctttttatccgccctgcgcccgaacggaaaattgtcaggattccagcgctgtttcacgcggatgccgtgcgctttaaaaaacgcctccgtccctttcataatcaataaatcccctacatttccatagaggggatagtcggcataaatgatgtcagactggggcggtatgacgctgagcagacctgtcagcgtctcttttaatcggctcatgacatggcggctgtccatgttttctcccctttcgtttcaaacagttgtgctagtgcgtcaatgacacgctgctgctcttcaatagacaaatcagacccggacggcagacaaatgccccggctgaaaaggttctcagagacccgttcatgatcgctgtgaggataaaaaacggaagatgagaaaagcggctgcgtatgcagcggtttccacagcggacgggcctcaatattttgttcggcaagacaggcgacggcttcctcaggcgtcacgccgttatcaagcgtcagagccgtcagccatcggtttgaaaccgttccttcaagctccggcatcatgcggatgcccggatacgtttccagcgcttccttatacctgtgaaagatttctctcctcgcccggacgcgttcttcgagcacttccagctgcgatataccgacgcctgcgagaatgttgctgagcctgtagttataaccgagctcactgtgctggtaatgaacggcggcatctctcgcctgtgacgcaagaaacttcgctttttcaatagctgcttcatcgtcagacacgagcatgccgcctcccgatgttgtaatgattttgttgccgttaaaggaataaatgccgaaacggccgaacgtgccgctctgtctgcctttatatgttgatcctaaggactcggctgcgtcttcaatcagacagactccgtatgcgtcgcaaaggcgtaacaattcatccatttttgcgctttggccgtaaagattgacggcgatcaccgctttcgggagcctgccgcaccgttttgcatcccggagcgcccgctcaagcgcggcgggcgacatgttccacgtctcccattccgaatcaatgaaaacgggctctgcctgctcatacacaatcggattcgccgtggcgacaaacgtaaaggaaggacaaaatacagcgtctccttttttcacacccgcaagccgcagggcaagatggatggccgccgttcccgagcttacggccgccgcgcttttcacccccgcatattccgcgagccgcgcttcaaacgaattgacgagcggaccgagcggcgcaatccaattggaacggaaggcttccgcgatgtattcctgttcttttccgctcatatgaggcggagacaaataaatccgtttgtttgtttgcatgaaatcatcctttttcattatgaatagaggagatgacgcgggccggaacgccgaccgccgtcacatgatcgggaatccggctgatgacggcagcccccgcgccgataaccgaccaaggaccgatgtctgtccgcggtatgacagacgcgccgattccgatgtgcgctccttccccgactttcactccgccggcaagcgcagcgcgcggggaaagatggacgtaatctccgattgcattgtcatgatcggcaaccgcacctgtattgatgatgcaatgcgcgccgatgtcagcgcccgcctgaatgacggcgcccgccatcacaaccgttccgtgtccgacggaagccgtatcactgacgattgccccggggtgaatgagagcggtgtaatcatcatgttcaagcccaagcgtttcagcgagctgctttcttacaccattgtgaccgatgcatatcgtgaatacggctcccgggacgagtttccgaagcatgtgcacgtctttcgttcggcccgtatacaaaccgtcccgaacggtaaaaccgctgaatccgtcgtccaatatgcccgcaagctccatatcggaacgagccttcacgatttcctttacaacttttccgtgtccgccgtttccgatcagcacgacctttttcacgatgacatatctccgctgcctgtgaagcgctttgccgtcgcatggccggattgatgtatcccctctgacacgagaacctttttcacagttaacagcagtattttcaagtcgagaaggaatgtgcggttatcgacataccacacgtcgagcttgaatttttcttcccaggaaatcgcatttctcccattaatctgcgcccagcccgtaatgcccggtttcacctcatgccgccgcgcctgctccgccgtgtaaagcggcagataatccatcagcaaagggcgggggccgaccagactgatatcgcctttgatcacattaaaaagctggggaagctcatcgatgctcagttttctgatcagctttcccgctctggtcagacgcagatgatccggaagcggcgcaccgttttcgtcacgcgcatccgtcatcgtcctgagtttatacaaagtaaacggacgcccgttatacccgggtctcgtctgtttaaagaacaccggcgacccgatggcgaatctgacggcggccatggcgaagagaagaatgacacttgcgccgcacaataacaaaatcgcggccgttatatcaaatacacgtttcgccttcaaatctgaacagctcctttcacttttcggcatttctgtaaagcaagccgcctttcttccttcgtacaaatgaagaaaaaagcgaatgcggcatagctcacgcatacggcaagccctgcggcaatcaggccggtccagctgtcaagcggtgaaaacagctggattccccggcagacagcccaggcaaatacagccgccgccaacggaccgaacatgcctttgtaaaacgcggttttctgaaagccggtaatatgcgaaacatacagcggcgtgaagacggcatttttcaaaatgagagagacagctccggcaatggtgatgccgtacaggccgagatgagccggcccgctgagaacaacggccaatagaacattcagtccgcctaagcataaagtaacgacggcgggcgttttttgtttattaaaagccgtccatacgtaaaatagcggcatgacagagagactgaccgccaaatacgcggcgtgaatgtataaaataggcgccgtctgcacaaacgacgggcccagccaaatcgacagaaacggttcggcaagccctcctaataaggcggcgggaagcgcgagcagaagcccgttgagccgcacggccttattggcgtaagacaggagaccttccatatcgccttttgaatagcaggaagtcaaaaccggcgcaaacagcgaagcgagcgtcccggcaagacttctaagcagaagcggaaattggataatcgccgcataaatgcccgcttccgacggccccagcacaaggtttgccgtcatcaggtcaatctgcagaaacagcagcacgccgatctggttgacagagctccatgcaccggccgaaaacagcactttgctcgtctgtaatgacaaggctttccgcctgaaagaaaaccacggaatcaatttcttaaaaaagaaaaacgtcagcacggccgcgcagacggcaccggctaaagccgagagctggatctgccagatcttcgggggaaggaacgtaaacagagcgagcacacacagcaccctgaccagcatttgcacggcctgaatggagcttgtgatataaagcttgttggcaaaaaacggccccgtcgcgaaacctgccataaaaaacgtcagcataaacagcacactgccgatcacgatagagagcctcacatccgttaacagcccggccggaacattcatgatgcggtcaataaaaaaagccgtcccggcgagcggcacagcgagcaatagcgaaatcacgacagacgcggctaaataattgcttacatacgcattggcctcatccctgttccccctgtgggcggcgacggagaaaaacctcacaacgacagagctcagcgcaacggtaataatagagaaatagttaatgatattctgtgtcagatggacaaacccaaaagcctctacacctaatgttttgacaataaagggggtcatccatactgataaaaacaccgatagtaaaaacgccgtcacattggcgccgaaattaatggcaaatttcatgctccttccgcactgcctttctctttcgttttccgatcgaaaaatgcatgcagaagcagcggaaggcgcattttgcacagaccgagcaccacacgttccccggccagcagctgtttatgccggcacggcgtgctgcgcaccgccgtttttaccatgtcatacgttaaaattctgccgatgtgcgccgtaatctcatgtgacggctgcggggcggcgcatgcattggcgatcagcatcgggatctgatgcttacacaaatacgtattgatatcgctttggcaggcgtccgtcagcccgttcgcctcataaaaagccattttcgcttcatattgcttttgcagttcgtcatctaagtgtggcttaaacggagtttctgtaaggcttgtggggttttcccggtaaatataaagcccttcatctatcactttgacacgtgctgcatggcggaacgctgccaagttaaacggagagtcctcggcaaatcggatatcttcatgaaacagcagcccttgcaatacttctctccggtatatataacgccatacgtaccaaataaaccgatgttcgtgcgcgcaggtcagcagatcagtcatctcagccgctgtgaagacgcggcccggcggaatggacggcggcatatacgctctttccttagacggcgtttccttataatagccgcatccggcgatatccagccggttcttctccgcttcttcataaagccgctcgaacatcgtttccgtcacatagtcatcgccgtccacaaagccgatataacggccgcgggcggctttaattccggcattgcgggccgagctgagaccgccgttttcttgatgaatcacccggattctcgcatcttctgcggcgaattgttcggccatccggccggactgatccggtgagccgtcattgacgaaaataatttcgatgtctctcagcgtctgttttgttaaagataccgcgcatgctttaataaaaggctctgtcttatacatcgggacgattacgcttaccagcggcgcgttcattgggcatcaccgctgattttcgagcgcagcccggcaaaataaacactgcgcatagaaccgccttcctcatacttgccgctcagcagccggtttacagcggccgtcacggcttcaggctccggacgttcaagcaatgtcatgttcggtatatgtttcagccattgaaagccttccatcactttatggtcaaaagaacgaatgacgacacaaggcgttttcgtcagcgcacaaaaaatcatcccgtgaagcctgtcagttacgacggcttccgcgcctttcagtgtattccacagcgcctccagctcttcttcccgtgtatggcggctgactctccggccgaccgtcgtggtaaaggaatgcagctctccgtattcttcagccaaagcttcttttaccatcgttctttcctcagcggtcagcgcgctctcccggtcctcacgtaagcagaggtagatcccttcccgcgggaggcgccgttcgcttttatccaaatataagaccatgtcaggctgtttgagcactgtttttccgggaaaatgacgcttcatccattgatacgtcgtctcgtctcttgccattaacaaaaggtcgggatgcgcattatacactttttgggcgcgtttcagttccttccgccccttttttgaatcagaaaagtgagccgtcgccggaagctgaacgatccgatactgatggaatgtttttataataaaacggcgcgtccattcctcataacggtacaaatcacccatgttcccgccgccgatgatgaataccatatcatcggggtggcgttttttgatcagcgcttttgcggatctgtatatatccttcatatccacctcaatgatgtcaaaatcgggatactcccgttcaagaaacgttttgcttgcgtaggcgatggcgtgatcgccgagattatcgtgggacggaagcagcgtcagaatgatcttttttcttgccgctgtatgccccgccccgtccgctgccgttccgaaatgaaattgagacgggtatttcaccttaagcaaaagccattccgcgagattgatttttaaagattgtatcgacatgtcttcaccctctgattttcattttgtactcgattgcccgctgatacgcggctgatgccagcgatacgaacggaatcagcttcagcttcgccaaaagcagaaggcatgagcgtttagcgtcaaacggcgccgttcctgttttggaaagactcaggcggaacacgggatcagcgcatatccggctgatattctgccatttctcagaaaaacgtccgccgttattccgcttccattcattaagcaggcagactgttccgtgctggacgataaaaaagtccagctcctgccggtattcctgtaagcagccgttttcacgcaaaaaagcctcgttcagccgatagagaaccagacctgagtcaaacagctttttctgatagctttgcacaatggaagtcaagtgaatccgataatgatagagcggctgatccacgtacgagaccgcatccgcgaatacatgcgcccggaggctgaagtactgatcctccacgtgttccagctcatcacgaagcggaaagcgcagccgatgatgttcgatcatggttctgttgtacagcttgttccatgaaaatccgctgactcttccctcaaataaatctttcaggtagagttgtttcggacggccctcatacgctgaagcgatcgttgatacgacagttttccccgtatccgcaaattcagccgcatattcgcaaatgacgagatcagcctgatcagccttcgctttttcatacatgcgcaggcaataatccggttcaacccagtcgtccgcatcaataaaagcgataaattcgccgcgcgccgcctcaatgcccttgttgcggaccgcgccgagcccccggtttttctgatgaatgacccgtattctctcatcccgcttttgataggtttcaagaatggccgggctttgatccgttgacccgtcattgacggcgataatttcgatattggcgagcgactgattgagcaatgaatctaaacatttttctaaataggtttccgtattatacacagcaattaataaactgaccgcgggtgtttccatataaacctccagtatccattaccgggaaaaaatcgttctgtacggaagcacagacgaatcgaccggcataagcaaatagctgtaaagaaaataacagacaataatggcgatataaatcagggcattcgatttttcatcaaaaatcctcacaaaataagggatcaggatcatttggtacaggccgaaatatatattaaaccgggcaaaaataacatcctttgtcgccagcagaccgaacagcaggccgagcagacagaaattcacgatgacatcaatgccaggccagagcttccgcagccgctcccggtagcagaaagccaaaaacagcggcagaagcagcaccgcgatttttacgacgttcatcccgttcgtattggtcatcagccatttctcataatggccgtacgagctgttctccagcacgacgacaaacagcgaaatgaacttctgatacagaaacgtcatgagaagaaacaaggccgacagcccgaaaatcgcgggcgaccaggctcttcttctgacgataaaataaaccggaatcatgatcagggccgaggaatgaaagagcgagcacaacagcacgatcaaaaaatagcgcttccagcttccgctgatcacgtagcggacggcccaaaacagcacggccgccaccatatactgcctgatgccgttaaaagaagcgtaataatgatacgtgcctaaaaacaaaaacacactcagctcaaacggacggccgaactcggcgagcccttttaaaataaagctgcacgtcacgaccgcaacggtgaaatacatgatttgcggatctttcgtgataaaattcatgagccagatgagagcggtaaaccccggatcaacagcggcttttttcgctccgaacccgaaaatctcccatatactgccgtaattgcccgccagtttgtacatcagcgcgtacgtctgaaaatccgttccgactctgtagcgtaacccggagaccaataccagcgatagcagcggaaccagcatgacgagctgattcgggcggtacccggtcgaaagcgattgatcacgcccgccgcacattttcgcgaaccatgaccaaatataaacaattcccatattgactacatatacaatcattcgttactgttccttttcacaattcatattgtaaagcttcataatcgcccccgcattttctcccgcatcatatcccagccgtccgagggtttctttaatgcgggccttgtcaggcaccggcgtctccgctgcccgtaaaatcgcggatgcccattgttcgggcggctctttgaggctgagcctgctgaccagtccgagcccggcatcggcttcttctgttatgccgtctgatatcacgcacggcaccccggaagcctgcgcttcaacgagcgtgacaggcagcccctcatatagagacggcatgacaaatacatccagcgttttcagcagatcatgaacgcgctcctctacgccgataaaacgcacatcatcatcaagccccagcttctccgccagtttttccatatcggtgcgaagcggaccgtctccggcgagaatcagctgaaagccgatgccccgctctttcatatcagcggccagccggagcagaaattggtggtttttctcctctgtaaagcggccgatatgtccgattgccaaacggccgccggcaatgccccgcttccttttttccgattctgtgtccgcacgcccgccggcaaataaatcgagatcaatgccgttcggcaaaagatgcacatctttttctttaccgaataagaaacgtcccgcctcttccccgcaggcgcacagcgcggtggcgtttgccgtgatcatccgtctgaatacaaatagctgcatcccggcaagccgcgacgaccgcccccgccacgacgtgctgtgagaatggcagatcctcaccgggacaccggctaaacgcgcagccagcgcgataaatcccgattgaaaatcggtatgggcgtgcacggcggcaaacgggcctttttcctgaatcacccgtttgacctgtttcacaaatgttatcggatttgtgctgccgatgctcggcacataaaaaagccgtccgccgagagtaagaatttcctcatcataagcgcacggatcgttcctatgggttaaaaaatcaaactgcaccttcgttctgtccatcttccggtacaaattcatcatcatcgtttctgcgccgcctctgttcatcccgctgaagatgtgcagcacccgcacaggtgtgtcagtcatgttcggcaagcccttctttttggcggatgtccctgtttttatgataacggttcatgaccgcgggcggcgtaatggcgcggatgagcggctttgcgatatacacgtaatgggaaaacggcagcttcagccgtctgcacgcctgaaaaacgagcacagcattatcaatggaatacgtgaacgacctccgtttaaacgcatcgctgtcctctctcactttatacagcgtttcttggagattgtaccctctgaagccctcttcaaaaaagcgcagccacaaatcgatatcctccatccgccgcgtccgcctgactgaccggtagccgccgagcgctttgtacgcttcggcccgcatcataatggtgccgtggcagaacggtgtgcctttcgccatgatttccggtttcggcaccggcggcaaaagccgggcgcccctcacgccgaattcgtcaaatacgagcatacccgtgcctacgacttgatagtgggcgtgcttgtttaagaaagcggcctgtttttccagtctcctaggggcggagatatcgtctccgtcctgtctggcgatataatcccccgacgcgtatgtcagacagcggttcaaagaagcggcaagccgttgatttgtcctattttgaatcagcgtaatccggtcgctgtaatgatccgcgtaacggcgcgcaatctgatacgttccgtcagttgacgcgtcatcacacataatcagctcccaattcttataagattggctcaggatggattcaatactctccgccaatgtctgttcgcaattataaattcccatgatgacggaaattttcggttgtgctcctgcattcatacgcttttctcctttttatccatataaccggcgtaaatatgcgccatttcctttaccgtgcgtgtttctgaaaagcattccgccgtacggcgccctttttgccccattgcttttcgcaggccgggggagcggtacagctttccaatccgatcggcaaacgccgcgctgtctccggccggcacgagaaaaccgttcacgccgtcttcgatgatctcacggtgccccctgttatctgcggcaacggcgggcttttcggcagccattccctcaaggacattcatgccgagcccttcccggatacttgaggcgacagacagatcagcaagctgaatgagttcatgaatgtcccggcaaaaaccgtaaaaccgcacaatatcggatacaccgagtgattcagccttttttctgtacgactcttccatcgcgccttctcccgcaaatacaagcttcagctcagggatgctgttcttcagcaatgccgcagcctcaatgaggataccctggtttttattgctgtttaattcagctggataaacgaggataaattctccggcggtgaagccgtgtttttctctcagacgttcactctctgcccggcttacaggccgaaacctgtccgtatcaacgccgatgccgtgtatttttttcgcgtcgcaatcggtttttttcatttgcttggcccgttcgtaatcctcttcattaatggtaatcaggcaatccgtataagaagaaagaaatttttcgatcgggtaataaagaagccaatttttcagaggcgctccctcacagaagtgaaaaccatgcgcggtgtagagcacctttgtccctttttggcgtgcttgtctcgcggcaaggcgggcgagcacgccgccgaccggcgtatggcagtgaatcatgtcatagccgttatcctgaatgagccgtttcagccgtctgtaaacagaaaggttttcgggatgaaacggtgagcgccggatcggaacggaaaacttttcattcacgaacggcagattcatatcaccgcctgccgcgacgtgcacctcccagcccatatcctgaaaccattgaaaatacggaagatgaaaggctttaaaatgataatcgacagtggcgcagaataatacttttttcgtcatctttctgacctcccatcacacgcccgcggccgcttcttcatgtactgattcgattgcctcaaacagccgttttctcagctcttcctcaggcagacggctgaattcttccataaagcggataagcacggcccaatccccgtctaccgcttttccgatatggattttcggaaaaatctgttccgtatgtacttcattatgattcagcagttcttcatacatcttttctcccggccggatgccggagaattcaataggaatctgttctgtcgtatagcctgataaatgaatcaggttttttgccagatcgacgattttgacgggttctcccatatccagaacgaaaatctgccgcccttttgcaagcgcccccgcctgaatgacgagtcttgacgcttcggggatcgtcataaaatatcttgtcatcgccggatgcgtgacggtgacgggtccgccttttgcaatctgctttttgaaaatcggaatgacgctgccccggcttccgagcacatttccgaaacggacggcggcgaatttggtgcggctgatttttccgaggttcatgatgaccatttccgcaaaccgcttcgtcgcccccataacattggccggattgaccgctttatcagaagaaatcagcacgaacgtttccgttccgcacatatcggcggcctcggcgacattttttgtgccgaggatgttgtttttgacagcttcctccgggttatgttccattaacggcacatgtttatgggcagccgcatgatagacgacgtgcggctcgtattttttcatcaaggtaaagattttatctctatcctgaatatcggcgatctccgcgtgaaaaagcacctctttcccaaagcgtgctgacagttcgccatgcacggaataaatgctgttttccccgtggccgagaaggacgatttcacgcggacgaaacgagctgatctggcggcagatctcagaaccgatagagccgccggcacccgtgaccagaatcgtttttccctttatgctgtcagaaattttgctcgtatccagagtgaccggttttctgccgagcaaatcttcggcgtttacatctctgatgtgtccggcagcctgcgttccgagcaggatctcatcaaattgcggcatgattttaatatgggcgcccgtctgcacacattctttgtataaagtctgaagctcatgggttcgcagagacggaatggcgatgatgatatggtgaattctcagcctctgcaccgccggcaaaatgctttcttttccgccgatgacgggcagccccataatctcgagcttatgcttcgtctggtcatcatcaataaaagccacaggcatgattccgagatcgtttttctgcgtaagctgacgggcgagcagcgtcccccccgcgccagcgccgataatcagcgcccgtgaagagtcattttgcttcttgccgatcgtttctttcagcacgcgcgaaatcatccggctgcctccgataaacaatagctgaaccatccagctgacggctaaaagccggaacaaaatcgtgtggaacaccccatattgaacggcggccgtcaccgctgcggacagagtgatccccttcagcagggcaagcagctcccctattcccgtatacgtccatacctgcttatactggtgaaacataaaagcgcatacatggtggctgatcagcatgctcaccgcggtcagcaggagcgctccggagtcataaaagtgataagaatcctcaaaaaattgatatcctataacaacggaaagtaaaacgagatacgtatccaatgcaaaaatcattgaaagtcttctccggtaagtcaatctttcccctcctcatttatcggtttagctgatacggttttcgcaaaaaaacaggcataacagctaagccgataaaaacgcggcattttaagataaattgggcatttaacccgtcctcacaccccgccaccgacgaccagcatctaaggcagcgaaaatcgctgcccacagcagagccgagtgcctccgttgataaaggtaaggagacatcaccttcaccgctcaatacgagtagtgttctgtttttttgattttctttttattcaaaagcgcgcccaaaagcttcgccttcgactgctgaagcgcgtctttcgccttttggacggtatccatttttgtttttccgctcaaaacgacgagaacgcttccatccgtctggttcgctaaaatctgtccgtccgccaccgccaaaagcggaggtgaatcgaaaatgaccagactgtatcggctgtacatctcctgaatcagctctcccatcgctttagaggacaaaagctcagccggattcggcggcgtcggaccgctcgttaagacataaagattatctatcagtgttttttgcaccgtttcgccgagggaagcgtttccgactaacacattcgtaaggccttgtacattttcaagctgataggtctcatgtatcgtcggttttcgtaaatccgcatcgacgagcagcacctttttttcctgctgcgcaaataccgcggcaaggttggcggcgctgaatgattttccttctcccggaacggaagaagtgacgagaatagagcgcaaatgggtctgtacagaggaaaactcaatatttgtccgaatggtgcggtattgttcagctaccaatgatttgtggtgtaaaacggatatttgagccaatccccgtcttgacttcttttttctgaatcccaaatgcctcactccccgaaatgtttttcatcagaccgtgtcttctgatttttgatatcatacacaacccctaaaacaggcaagtctgttttttcgctgagctgccgctcgcttttaacggtttcatcaagaaagtggagaaaaaacgcaagcgtcacaccggccataagggccgcaccgaatgccatcatgatattccggatgcgcgaaggcttgaccatcgggctttccgatgcttttgcctcagacaaaacgatgacgccttttatattcatcctgtcgcggacttcttttttaaatgttttcatcagcgtgttcgctattgcggcggcctgtttcggattctcatcctgcaccgctgcggtgatgatttctgaatcggtttcgctgcttgtcgtgatctttgctttcaaagcggatgccgtctcggaaagatggagcttccgcttcactttctcaatcacaaccgggcttttcattatcgtttgaaacgtgttgttgtaatggagattcagctggatgtcgctgagatttgattttttttcaccgcttgtttcatgaatgagcacctgggttgacgcctgataaacgggcgaaatcactcgaaattggatgtatcccgtcaccagcgtcactactgctgtcatgataaaaatcagtaaaaatctgcgcttaataatgtcaaataattctttaaaactcatattctcattcatgtaatatacagcctcatccttgatgcatcaggcttaaacgcccccttctgttaatgattggattataaaagaaaagctcgaaatttgaaaatttcaaattaagccatttagttctttttagagaacgttatcatgattttcctcttatttactgcacttaccttataattttaaattttataaagaacaaaaaatttcttataatgaacaaaaaaatgccagtatacaggggagaattcagcataatgattggaagaataatacgtttataccgcagaagaaaaggctactcaattaatcagctagcagtcgaagcaggtgtctctaaatcttatttaagcaagatagaacggggggttcattcaaatccgtctattcaatttctaaaaaaagtgtccgccaccctgcaggtcgatctgacggagctttttgatgccgagacgatgctgcatcacatgggagacacggaagatgagtggcgcatccatcttgtgcaggccgtgcagtcaggcatgccgaaagaagaactgttcacctttacgaacaaactgactgaaaaacggccggagcccgcaccctaccgcaacagaaaactgactgaatccaatattgaggagtggaaagcgctgatgcaggaagcgaaagaactcggcttgtccgttcaggaagtcagatcatttttagaacggaagcgttactaatcatatgctgatgaaagggcttttatttccatcttgtcatcatctccgtttataatgaaatgaaaaagggggatgaaataatgacagaacttactgttcaaacccgctgcggcgcattgaagggaactgccggtcacggtgtccgcacatggaagagcataccgtatgcaaagccgcccgtgggagagctgagatttaaagcgccggagccgcccgtaccttgggacggcgtaaaaaatgccgactcgttcgggccggtttgcccgcagccggctgatttgctgtcgatgtcattttccggagatgtaccgcctcaatctgaagattgcctttacctcaatgtgttcgctcccgattcagagggcgggaaacggcctgtcatggtatggattcatggcggcgcatttttcctaggtgccggaagcgaaccgacttacgacgcatctgctcttgccgctgacggagatgtcattgtggtgacacttaattacagactcgggccgttcggttttttacatttgttttctattgatgacacatatcccggcaatatcggcatgctcgatcagatcgccgcgctgcgctgggtgaaggacaatatctccgcattcggaggagaccctgataatgtcacggtattcggtgaatcggctggcggcatgagcatcgcctcacttatggccatgcctgacgcaaaaggcctgtttcataaagccatactggaaagcggcgcctctcagacgatgacggcggacgtggcaaaagagatcacaacagcatttattcaagaagccggcactgatcaattgcaggagctttccgttaatgacattctcaagactgcggataagttgcggaatacaatagatcaaagcatttttcatcttttgtttcagcccgccatcgatccggccacattgcctgcggaaccggccaaagccatagcagacggggccgcggaaggcataccaatgatcattggaaccaatcgtgatgaagcatatttgtttttcacccctgatacagacattcattccgagaaaaaacagcaagaatatttgctttatcatctcggagagaacagcgccaagctagcggcagatttatatccgcattctttaacaggacaaattgatatgatgacggatctgaaattctggcggcctgccgttgcctttgcacaagaacaatcgcaatacgcgcccgtctggatgtaccgctttgattggcatggcgaaacaccgccgtttcataaagcggttcacgctctggaattgccgtttgtgttcggaaactttgattctttgaaaaagacgctgaaggaaccgctcagcgaagatgtaaaacagctctccaagctgattcaatccgcatggatcgcttttgcaaaaaccggaaaaccggacactgatcagctccattggcctcagtatgaaacaggttcgcgtgagaccatcattttcaacacatccgtctcgacggaaagcgatcccgattcagccaaacgccgcattctgtttcaagcataaaaaaacccccaagggatcggttcccttggggtttcgttttcatcccacttcagacatcagtcagcttcaacctggtcattcggtttcgcagaatacccatttccatattaatccttatatgttatattctattacaactaataatctaaccattcataaaggagtttttatatggagaaatcaaatattatcggcacagctgccgttattatcggagcgcttatgctcttagtttcttatctcttcctgcgcggcactgatttctatgccgtgaggtggataggggctgtgatcatggttgcaggattttcatgcgggccggcccacacaatttcaaaaaataaaaacaaacatgaaaaagaaacccggtaaccttactgggtttctttcatatatttcattctatctcacttcataacgcaattccgcaaattgcttgtagcgccggacatccgtaagcttcaatgcggtctccgtctctcccggtctgaataacggaataccccggccaagcagaacgggagcgacctgaatgataaactcatcgacaagctcctctttcaatatcggctgcagcagatcgcccccgccgacaatccaaatccgcttgccatcttggcgtttcaacgcttgtataaaatcggcaggttcttcatgaataaaccgcacatcttcagtacgcccggtcaatgtccgtgaaaacacatagcattctttccccttatatggaaattcatcagggaataaaaccaatatttcctcatatgtttttctgcccatgatgatcgtatcgacagattcatagaagtctgcataatcggtgtcttcttcaccttcagttccgatcagccaatccaaagaatgattttcccgcgcaagatagccatctgcgctgacagctccgtaaaaaacgagctttctttgaccgctcatgaaaacccctcccctttttacaagttcatattgagttcatacaaacctattatactgcaagaagccggataaaccggcagttaaaaaattgaggtgagtataaatatgaacagccaagaaaaacgaattgcgattatcggtgcagggcccggcggtctgacactggcgcgcattctgcagcagggagggctcgccccggtcatttatgagcaggagacatcaccggctgagcggcagcagggcggaacgcttgatttagatgaacaaaccggacaaaaagcgctgcaggcggccggccttctcggctccttccggtcgatctgccgttatgaagggcaggcgctgaaaatcacagataaaaaaggaaccgtttttgctgagacagaacctgaaaaactgacggatcatgggcggcctgaaattgaccgaaccgaacttcgcagactgctgctgcaatcgctgaaaacggacacgatcaaatggggacataagctttctcatgccgttccgcttgagaaaggaggtcataagctcgaatttgaaaacggacatacagacgtctttgatcttatcattgcggcggacggcgccttttcccgggttcgtccccttctcagcgatgcgcctgttgaatactccggaatcagcatgattgagcttcatattatgaatgcggcggctgacttccctgacctcgccggttttcacggcacgggaagcatgtatgcccttgatgaccggaaagcgattatggcccagctcaatggagacggcacagtccgggtctatttatgctttgccgccggcaggtattggatagatgaaaacgacatagattatgatcagcccgaggaagcgaagcagaaacttctggagctttttgaggactggagcgacgacctgaaacattacatccaatacgcaggagaaaccattctgccgcgaagactgtacagcctgcccgtgcagcataagtgggagcacaaacaaggtgtcacgctgatcggtgatgccgcccatctcatgacgccgtttgccggggcgggagccaatctgactatgctggatgcggcggaactcgggctttctatcttacacaatgctgatacagacaaagcggtaaaacaatatgaagaaaaaatgtttgcttatgcggaagaaacggcagctgagaccggctcacacatgaaaacattcttctcagagagcgccgcacagaagataggcgccatgatgaatgcattttaaatctgatatatgaactggaggtgcgctgaaagtaaagctttcggcaaacaaatgacagaaaaagcgaaatgtatccctattcatttacacatcccgatcccggcaatgccggatggacaattcacgatgacaccgacactgtttcatacagacaatgatttgattctcgttgacacgggaatgcccggtatggtgaaaaacatcgtaatgcagctggaagctgcgggattttcacccggggaattaaacggcatcttgctcacccaccaggacattgatcatatcggaagcgccgcacagctgaaaacgaaatttccggacattgaaatttatgcccatgacgctgataaaccttatatacagggagaacttcccctccttaaaacacttccgaattccctcgctgcgcaaatgtcttccgacggcaagcagacgtccggactgaccgtcactcataccgttacagacggagatcaactggccggcgggctgaccgtgatccatacacccgggcatacaccggggcatatcagcctgtatcattcggcctcgaaaacgcttatcgccggagacgccctgatcgtcagaggcggggagcttcaagggccgaatccgcctcaaactcctgacatggaagaagcctatcggtccgtcgcaaaactggcatcctatgatatcgaaaaggtcatctgctatcacggcggactatacgatagagacgttaaccgcaaaatcgcacagattgccgcagcagggcctcctcttaaaaataaggaataacagcaaaaaacccggccgtcaccgggttttagtttcttcctgcttttgagatactgttaagatgctgtctatccatcttccggtaatcggcataaagaaatgaaggatcattcctcctaaacaaacggtgaaaaacgttccaacgcctaccggtccttttaagatcaatgccaatatgaaaaatacgaagtaaatgaccgttcttgaaaaaaagatgcttcttccggttaattcgcggataattaacgttaaccggtcaaccgggatcggtgcgaaatttgtgtgcagataagtcgcggtgcctatccctatcacaaccaaaccgattgcaaaacaccccgcttttccgtaccatagttcaggcgtgatgattcgatgcaggaaaaaaagccacaaatcaatcccgattcccgtgataaacgcggtaatcattcctgaaaattccggtctttgtctttttaacattgaattacagcaaattaacaggaaagctataatgacttcccagcttcccacggtaaggcctgcatttacagatagtcccacgataagcgcatcaaaaggcgatgttccaagatctgattgaatagtgacagaaataccaaaggtcaatatgatgattcccaaaacataaaaaacgtatttcacttgatcagcctcattttataattttatgttgcaaatacaataaaattacgttatgtttactatacggtattttcattgcaaatacaacataaatcaactgaagaaaggagatgtatgaagatgagtatcaaaataaaaaagtgcagccttaacgatataacagcactccgagagataagcattgaaacattcaatgatacatttaaagatcaaaattcacctgaaaatatgaaagcttatttggaaactgcatttcgctctgaacagctgaaaacggaattatccaatccctcttcgaaattctattttgtttattatgacgatgaccttgccggatatgtaaaagtcaacatgaacgaagctcaatcagaaaaaatgagtgaagattctctagaaattgagagaatttatataagaaagaactatcagaaacacggacttggaaaatttctgctgaatcatgctgtaaaaatcgcaactgaacacaataaaaagaacatctggctgggcgtatgggaaaaaaacgaaaatgcaatcgccttttatcaaaaaatggggtttattcacaccggagaacactctttttatatggggaatgataaacaaatcgactttatcatgacgaaaaacctgtcgtaaaagccgccggattgactcatacaaaaaaacccggccaagctgccgggttttttctattattttaattttcccgcgcgaatatcatcagtcattccttcgtacggcgcttctgaaatcaatgcttcgttattgattcccgcattgttgagatacgtaatatccgcaaactcgggaacgacatatttcgggtacgtgtcatatttctcacgtgactctttcatcacatcaatgtaatcattttggtagcacaccgtgatttccggatgctcatgaacccatttcgggaagaaaataatcccgtgcatccgtttttcattcggcataaagtttaatgaaacgtctgtgcctgtcggttcagtccatgacactttatatacgccttctgtcagctttacgatattcacttcttggtcgcgcacccagcggccgcctaccattccgctatgaatccgatagtcgatcgtatgatcatttttaatataaatttcatactcccagccgttttcatacgtgtaaatcatatggcttccgataaagttttccatgctaactcactctccatattattattattgaacttcataaatatccaaccgaatgtcatccggcaatctgaccgcagccccgataaacatccggtcctgcagatgctgatatgccttactgcttgttttaaacacaggcacagtgcggaaatacacgtgctcgtgatcaatgatgcgcccctctgcagcctgctggcggaacggttcactgacttggcggatgccgttgttctcaacataaatgacttcgtgctcttcggtttccagcgcgtacctagcagaaagatcaacccggccgttcggacggatgatctgggcgtctgccccgcccgggagaacacgcccctttacggcgccgctgaccgttccgccccgaatcaggatcagctgccttttccctaatccagtctgcccagcaacgatcggttcatccactttaatttgcagagacatcactttttttaaagaaggttcattcaggacgtatcacctcccaagacattatgtttatatatacatgtaactatttacatgattaattgtaacgctgttaaaatggactgtcaaatgatgagatgcttcacccggtaaaaaggtgtttaataaaaaagacaaggacggcaaatgccgaaacccttgtctttttcatttactctggcgctccttaggtccatgctcacatgcggctcgcgaactagaaaggaatcataaagaggttttctctattccagcgccttttagtattcacattctttttcttgacactcaggtttctcttcagcatcgactaaagatatccctatttcatcattcgttttgtcataaagtccgaaaaattctttttccttattaccattcaagtaaccctcgatggaaattccccccataggatctattttgtaatcgttatcgtatgtaatgtgctttatatttttgtaattagcttttatatagctttccattttatctttcgcttggttaaaaagttcttgttctgcttcttttttatcatgttggtacttcaagtaggtacctcctgacgctataaccattacaaacaccaggataattatgtatttattcacaaactcatcctttcttatattaaatttatatctacttttggggtgttgtacatgtctaaaaaacatgaatgtatcaaaagtcgagaatacttttatataagcgttagttacacttgcctaaagggtgtgtgaatttctaaaaaatcttatagttagatctaggttaaatgaagttatgaagaggaagggaattcaaagccagaaagaattggctgagttaggttagctctatgaggctgcgataagcagatttaaaacaaatatcaagatatgatatcacaacactattcattattaacagaggattaaatgtgcctatggaagatttgttttatatcgaggagatagagggtaggcaataaaacaaaattagcccagctcgatttgagcgggctaatttatcttgtacaaagcttatctttacattcttctttgggttcggcatcaaccgtatatgacaatatttctttattacttggatcatatagaccttcaaactctttttttccgttagtataacccttaacactaataccacccattggattaatatagtaatcctcagaaaaatggatatcatccacatttttatagttcgttgttaaaaacttttccatatgattctgggcttcttcgaataacgcaatctcttttttcttttgatcatactgatgcttcataaaaagacccccaactgctataattattaaaataaggataattatgtactttttctttttcatttggaaatcaaccctttcctataaataactgtcgtttttaagtaaacgaaatgagcgaaaacttgatatgaatatactttcagcatgccaaaagcaaagctaaccaattcagaattcatcgcgattgttgctgacaagttaagattggaacttaaagcgagtaaaatgctatctgacgtttttcctatcgttgagttgtcatgatatttgtacgcagttaccgttaattatcggggatacctcgacaaatgagacggtagaggcgattgatctcaggaataggtttgaactgtatgagaaacatatcacgaattttgtaagataattaaacaaaataaatacccactcatcctgaggtgggtattttatctttcttcggcattgaccactgaaatacctatctctttgttcgttggatcgtatataccggaaaattctttttctttattattatttatgtaacctgaaacttcgactccgcctgtcggatcgatattgtagtctttggaaaagtgaacttcctgcacatttttatagtctttttttaagtaattcttcatatgatcttgcgcctcattcacaagtttctcttcgttcttatgtttgtcatattgatgcttcacgaaaaaacctcccactgctataattataacaattaggataataatgtattttctcatgcgtatcatcctttcgaacttattttacaatatatgaaaggtgatgtatatatgccaaaaggaaaagaaataaccgtctcaaatgttacagataaagaatattaccgtttgagtcaggcggcctaccactataaaatgttagccctgcacatgaaatataaaaccccctataaaatcagtaagacgtcatattggtacattgagaaagttgagcaggattctgatacgggtcttgatgcctttgtattctcaaaaggtgtaaagacaaaagacggcaagtgggcgaagtctgataaccccgaaaacgtcgtcatcgcctttgcgggaaccgatatcggaaaagatccgatcaatgacggcgtaaaagcagacggcgggaacattgttttcggaaatgatccgaaaaaagaagcccattatattgttaaaaaaggcgccaaagacacatctaaaacactcggaaaatataatggaacacctactcaagacgccatgcttacaacgggaaactataagctgctgacgaaaacatcgcaaattgatcaggcagatcagctcgtgaaacaagtcaaacgcaaatacggaacatcaacaatcgtttcaacaaccggccattcactgggaggcgcagaagcggaatacagtgcggtcaacaatgatatttacgcagtcgcttttaacagtccttctgtcgtaaaactgcatgataaagaaacacagaaagacatcaacagcggcttatacgatccttacatacgatcaatcatcaatccggacgacatggtcggggcaggttattggaacgaatatgaccggcataacgggacaacgatttatacgaaaaacccctcactctcacagttcagccgaaagctgcggcttgatgggagcttgagcgagcagatcggcaagaatctcgcttatttcttcactaccgtcattctgagaaatccggatacacacggcttaaatgaagcaaattttatgtttgaccgaaacggaaacatcgcaaatccgaacggagatgaattagtcttcgataaaaacctcggagctctcctcccggccggtgcgatcggaagcggagacgcgattaaagtaacgcccgcgatcgccaaaaagctggctgaaaaggtgcaggccatgaccgaggatttgcggacaatgaaaaaagaagcgcagaacgcctatcaggagcacgatgaaaaaatcgccgagctgaaaacggaattttacggccaagtcggacacggcttgtttgatcagcttcaggcacaggatgtgaccaatacaatagaagatattgcgcaatcctacgataaaggcccgattttttatgacactcaggctgagcaggcgtttattgattctttgcagacggcgatcacggaccttgaagagatcggcggattcttacatacaatagcggatgactttaaagaaaaagatcacatgctggcaaactggttacgtttataggagatgatttttatgacgacattagacaagcttctggaacaaaaagatgatcccatgaggaaaatgctgcagcggcagatgctgaaaaccgccatgacgcaggcagcggggacaaaactggaaacagtgcgccgaacgcttcagccaaaattcgatttaaacacattgaaagatgaattaactgaagtttattcagccctattgaacagcttcgaaggcaaggcgcaaaaagctctcgcacagcggatcagtgaaagtgcgcagctgattgccggagctgaaaataacagagacacattcattaacagcttcaaaacaaggtaaacaaaaaaacctcacagattgattcatctgcgaggtttttaactgttacgcgctcggagggattcgaacccccgacagacgtggtaccggaaaccaccgctctatccaactgagctacgagcgcacgttatttcaatcagatacctttatattataataaagaaacgtgcagaaagcaatactttttcaatgaaacgtgatttacggcgtatcgtgacaggattatgcagcgttctcatgcagcataatcccgcatcatataacggctattggtttgcgagcagacacgccgccgaaacgctgcaatgtttcagctttttttccaaatgtcttttaacgtccaataggtgaattcctcaacctttacagcgcctttctcagaaaacagctcaagccccaatctgccctctttcggatagatacggcttgtcatcgttgcttctccatgattggcgaatacttcaatcgaagacctgtcaataaatattcgcagcgccagcttgccgcttgcatccatccgcactcttctcacaccgtctttcgctttccccatcttggtgcaatcaagtgtcaattttttatccgttagattgtacttaagcacaagttcctcttcatcaaggccgcgaattttaatacctgccgtttcggcatcgcaatcgtttacatcatacacgacttggacttccagcagctcttcggatgtctttgccaagtaactgcctgaaacggaccggccggcacattcccgatatttcatttttcgcagctgcttggtttcttccacgggattcatcaaaagtttatgatcatcacgcaatgtcagttcccgcggcagtgtcaaagcaccgcaccatccgtccgcttttgtcggcatctcggattcccacatatccatccagccgacggcaattctgcgtcctttatcatccagtaatgtttgaacggcgtaaaagtcatggccgtgatccagttctttaaaagcgccgtgtgtaaatttatttgtttcatcattatagtcaccaattaaataaccggtttgatgtaaatttttataggaatcaccgtcggcttcaataccctgtggcgaaattagcaggacatgtttgccgcctaattcaaagaaatcaggacattcccacatatagccgagatgaccgtcactttgggcgagaacacctgcgtattcccaattacgcaaatcagatgaacggtataaaatgacccgcccgacgttttcttttgtggaattgccgactaccatataccagtctccgcgatgcttccacactttcgggtcgcgaaaatggcgggagctgtcttccggcggttccgcaataacagggttatcttgaagcttttcaaacactgcaccatcttggctgacagcgatattttgagtttgatagaaaaggtctttctcggggtcaatcatgttatgcccggtatagattaagacaagtcttccacgatcatcgaccgcgcttcccgaaaaacagccgctttgatcaaatgcgtcgcccggcgctaaggcaatcggcaagtgctcccaatgaatgaggtctttactctttacatgcccccaatgcatcggcccccagttctcatcaaacggatgatgctgaaaaaaaacgtggtattctcccttaaactgaataagtccgttcggatcattgatccaattcgcccggggcataatatggtaccccagccgatatctttgtttcactttaccctcggctttcttcaaggcttcttccgcctgctgaattctatccatttgcgacatcctctctatccgattttttgtaaatgctgcacgcgcctgctgttttgtttcgggcccaataaagtaaatatggagatgacggtaaaaccaaagacgacgattcccatgatgagataggtttgccggaaccccgcactgtcatataatcctcccgccagcggcgacagaatcgacgcgcctgcctgagatgcgaattggaaaccgacgagataaaggacggacgacagacgcgtatcaaaattggccgccaaatatttaaaaacggcgatcagcataatcggcagttccagtgcgtggatgagtttcattgatgaaattcctactggctcaactgcaattccggacccgacgatgcggaaagccattaaaaaccccgctaaaatcaaactgtttttcgctccgaacttattgacgataaaaggcgcaagaaacatcatgccggcctccaaaaatacctggaacgaattaagatagccgaatacttggttgcctatcgccactgaaggaaataaagacgcatagtagatcgggaactgctgatcatatacgccgtaaatgcaggtcacgccgataatgtacatcataaaaaaccaaaaatcctttattaaaaagagacgacccacatcttttaaccggaccgaatccgctctgtttttctcatggtcggtcatttcgattttcacagacatgataatggccgttaaaatgacggctgatacagacgcaatccagaagttgatattgggattgatattgaaaagctgccctgcaaaaaatgcagcggccgcccagcccagcgagccccacattcttgattttccatactcgaattgatatttccggctgaccttttcaatgtaagtttcaatcgcgcctatccccgctaaaaaagcggcacccaaatacaagcctccgacagccgcgccaaggaagacgttgtactgcaggagcggtccatagatgaaaatataaaacggacctgtaaataggagaagaaagctgatcataaacaatatctttttcttcagccccaatttgtcagagataaaaccgtaaagaggctgcatgcacagggcaaatacggcatttacagaaaagataatgcctgtcgctgatccgtttaaattgatttcttgccctaaccaaatcgcaaataaagaatagctggaagaccaagtaaaaaagaaaaagaaaaaataagcactcagttgccaatacagactttttgcgcttttcatgttcaccgctcctttgatcggacatggatatttcttaatctccgttcccgaactgcttgctgagccacgtacttcctacttctttttcagcagattcatgcgagtgtttggtaagcgctttcttttttgccgctgttcgcccctttcacttttgcggcagcaatatccttttttgtaaagcactttcaaaaagaattgtatgtcaaccggtttcatatgtcaatcggttgacatatatttttctgattattaaaactaatcctgctcacatgaaaacagacacatggagtttccttgcacatgtcagcccgattctctaaaataagtgcgtgacgagaattgtaagccatttcagtaaagcaggagggcaagggaatgaagcctaacattcatgatgttgcaaaaatagcgggagtttcctctacaaccgtttcgcgggtattaaataaccgcggctatatcagcgaaaaaacaaaagaaaaagtgtacagggcgatggaagaaatcaattactttccaaacgatctggcccgctccttattccgaaaacgaaccaatttaatagggcttatcattccgaactccagcaacccgtttttcggcgaactcgcctttcatattgaaagcatttgtacgtccatgggctacaaactgctgctttgcaacagtttacatcggaaagacaaagaagaaaaatatttggaaatgctgattagaaaccaagtggacggcgtcatcgccgtgacttataaccggggaattctcaattaccacaagcaaaatctgccgattgtcgccattgaccattacttatcggactcgattcccgtcgtcggctcagacaattatgacggcggaaaaaaagcggcggaactgctgatcgaaaaagagtgccggcacatcgtccatatcaacggtccgattgaactcactacaccggcaaacctcagaagaaaagcatacgaagatgtcatgcataaacacggacggcagcccattacatacgaagtgcccttttatcaagattaccatgacatcatttcaacattatttgatgaacagcctgacaccgatggaatttttgccagcgatgatatcatggcagccgcagttatgaccgaggctaaaaaacggggaaaagacatccccaatcaattaaaagtgatcggttatgacggcaccgagaccgttcaatcaattctgccggaattgacaaccatccagcagccgatcgaattgatttccaaaacagccatcgagattttagctaaagaaattgaaggcgaatttgatgatattccgccggaaacgtatttgccggtacggcttttggaaggacggacaacttaatcaggtgcggtgctgacgcgtctgcggtctatttcgaatgccccggccatataattttctcaagctccgggggcgcggtatagggcagctcggcatacagcagcctattgaccattgatcacttccattttcactttgctgtttgaactttttgttttctgggaaaaatggttttagaagaaaaggttggcattttggtcagcgttttgtttgacctttattgaccaaaaatgtatcatgtaaatacatacttacctaaaaggtgaaggaggagcattatgaatttaatacctacagtcattgaacaaacgaaccgcggagaaagagcttatgacatttactcccgtcttttgaaggaccgtattatcatgcttggatctgcgattgatgacaacgttgcaaactccatcgtgtcacagcttttattccttgaagcggaagaccctgaaaaagatatttccatttacattaacagccctggcggatcaatcactgccggtatggcaatctatgatacaatgcagttcattaaaccgaaagtatccacgatctgcatcggtatggccgcttctatgggagcattcttacttgctgccggagaaaaaggcaaacgttacgcgcttcctaacagtgaagtcatgattcaccagccgcttggcggagcgcaaggacaggcgactgaaattgaaatcgctgctaaacgcattctcttgcttcgcgataaattaaacaaagtgcttgctgaacgtaccggccagccgcttgaagtgatcgagcgcgacacggaccgcgacaacttcaaatcagctgatgaagctttagaatacggcttaatcgataaagtgctgacacgcaatacggaagaccagaagtaatatcccgcctgcaagagagactcaacctcttgcaggttttttttatgctttctcttcattcaaaaaagtaatgaatgcttttacgacagacaattctaacactgaagaatcatacatgagccacgtatcgcgtatcacaggctcgttatttttataggaaagcgccaaggtgtataattcatcagaaggctgaagacagatttccggcacaacagaataaccgaggccgtttttcaccatctctttacaggtttcctgcctgtctacctccattgcaatgaaaggcggctcggaaaattgattattccaccatttttgaatcaaacttttcaaagaagcatctgtttgataataaatcatcggcaatttgggaaggtcctcactgttgatttcagttttcgaaataaggtacagcctctcttcatttaacagttgtttttccccttgccaatcataatttcccctcataatcccaaggtgtacaccggaatgatgaagcagatccataacctttgcactccatcccgtattgacgtggaattgaacagacggatactgatcagaaaaccgtttcagaatcgccgggagcttatactgagcaaaattgctcgagactcctaatctgagaaccccgctgacttcatggctcatattgaggatatcatccttcatttttctgaattcccgcagcatctctttcgcatattcaacgagatattcaccttctgaagtgaattccatccctttttttcttttataaaaaaggcgcactccgaattgcgcttccaagtttttgagacgataacttaacgccggctgcgtcatatataaccgctctgctgcctttgtcatatttttttcttcgaataatgttatgagtacaacccaatccttttcatccatatgaaatcccctcaaatatttttctgctatagaattttctcctattataaaagttttttattcaactttataaaaattatatgttttacttataatcctcatttatcatacgatatttcccaagggaccggtaccttttttccacacaaaatgatgtaaggatgagacagcatggaaaaagttcctgtaaccgtcatgagaggcggcaccagcaaaggcgtttttattcatcaaaaagacatgccaaacgatacaaacctatggagtgattttcttttagacattatggggagccctgacgagagacaaattgacggtctcggcggcggccattctctcacaagcaaggcagccattattaataaatccgccagaaaggacgcagatgttgagtatacgtttgctcaggtcagcttgactgacaaatttaccgacttcaaaggcaattgcggaaatatttcttctgccgtaggcccttatgctattgagcaagggctcgttcaagcgaaagagccagttacaaaagtcagaattttaaacacaaacacacaaaaagtgttcatagcagaagttgaagtcaagaatggaacatttcattaccaggggaactgctcgattccgggggttccgggcacagcttctcctatttatctttcatttcaccaggctgaaggagcggtgaccggaaagctgtttccgactggtcagcctattgatgttctcgatacaccgtatggaaatatcgcggtatcgattatcgattacgccaatccgcttgtctttgtaaaagcagaggacgcggggcttaccggcatagaacttccggacgaatatacaccggatatacttgaaaaacttgaagtgatccgatcgattgcagcagagaaatgcagattcgcttcaagacatgaggctgcggcaaaatcacccgccgtgccaaaactaactttaatctcatctccagcggattatattgatacaaaagggataaagagacatgctcaagagatggaccttgtcattcgtatgatgtccatgcaaaaaccgcatcaagctttagccattacaggggcggtatgtacgaccgccggcatgctattgcaagatacattattatctgaattttcattctccggcaaaacgatccgcttagggcatccaagcggcattttaaaaaccgaagcagttgctgatccggctggaacaacgattaaagtagtacgcacagcaagaaaaatctctgaaggctatgtgtttacaaagcaaagttacaacatgaatacgctgaatcacattggttaatacaagccttcagacaagtcaaagataaacggaggaatacgagatgatcaatgtaaacgcgtctaatcgattaaacagactgcctttttcaagagctcatcaagcggtgctcgttatcctttcattcgcttacttttttgattttatcgatttaaatacgttttcatatgcggcgccttcacttttaaaggagtggaatatatccactcataccatcgcttttatcacgtctgtctcctatttcggaatgtttatcggtgcctctgccggaggatggttttcagaccggttcggaaggaaaaaaggcttaatcctggttgtcacctttttctcttccttctccctcctctcttctctggcttggagccctgaaatactcggtgtttttagatttcttacgagtttaggcatcggcgccacgacgattgtggcaagtacgtatatcagcgaatttttcccatccgcaactaaggggaaataccaggccatctgtattacaatcggcatatgcggaattcctgccgccggctgggtggctaaaatggtcgtgccggccgccccttatggctggcggtttatctttcttttcggagcaatcggtattttctttccgctgatcgccaaaaaactggatgaatccccgaaatggctggatacgaaaggaaaaagcgaacaagcacaccgtattctgcttgagcttgaggcaaaggctgaaaaagaaaaaggtgaactgcctgaaccagctccgactctaaaaggccgacaaacccctgtaaaatccgttccatatcggacgctatttcaaaagcctttagcaggaaggacttttgttttgatgacgatgtgggcagcttccacgattgcaattcaaggcttcggcacgtgggttccgacccttttggtaaaagaaggcgtatcaatggatgagtctatcgtatacgtcactctcggtacgatcggtgccccgctgggcgctctcattgcgtcgcaaatctcagaccgtgtggaacgaaaatgggccatttctgttttatcgttaatgattatggcgcttggattcttttacggcatcaatcctttgccgatggtcattgtcatatgcggatttctcatgcacatgtttgaacgtactttcagttcgatcgcatatgcctatacgccggaattatatccggttgaagccagggcgtctggaaacggcctcacttacggcgtgggacgtcttgcgaatgtagccggtccctttgtcgtcagtttcctgtattcgggatacggatttttaagtgtcttcttgttctttacaggctgctggcttctttgtgcactgacagtcggtatatttggaatcggttcaaaaaaacaaacgattgagcaggatgatatcatatcggaagaaacaatcgtgcaacaaaagttgtaaacgcatacactatgcaaaccgcaaaaaacatccatctcctctgaggaaatggatgttcttctttcaaaactatccgcagtctctttctcatcttattctcatacatatgtcttatcatcaagaaaggcgtgagcgcaatgaagtggagaagacggtcttttcccagaaagaaaaggtattttatgggcggagaactttccgatcaggatggattagatgcaagctacgaacaatcttccttcagagcagttgatgccgaaacatatttcaggccctcttgtcttcctgtcctgaacacagcaattgaaagttccttttttgatccttatattgataagcctgtgaaaagcattcatctgccccaatccctctctttggctccggacaaaacgatcttacattattttagtgttttacgtgaagccgaaaatcttacgcgcgaaaaagccgggggatgcggtacagtcggccaggcacacattccctttccgctggcctatgcctttttcaccccgtcctatcataagaaacattcctacaaagcttttcttgcctcattcgaaggtattggccagacccatctgattaaattgaaccggcttgaagacttgcgatatttcgttgagatcgaaaccattcaaggttcaaatcaaaacgtcacgtttttcgcttattatcacggcgttgtccagctggaaaaacataatggacgatttcagatcggacgaatgacttggtatggcgaagattttttgtgtgccgcttatcatttgtggcagcacaatgcagaaagcagccttgatatcaaattcggcaaatggtgcaagcttattaaaaaaagatggcctgtccggcagaatggttatgtcaaaacaattgactttgacggaacagacggccatcattatcgttttgtctattttcagctcacgaatgatacagataggttagcaaaacaactgagaaaaaacagctccggccaatgggagcagattcatattgatcctgatgactgcttatagaatctccctttacacttcccgccatttcttatctaaaatcgggtatgtgtactgattcatctgttcaatcagctcatccggacgtgatgatgtatgaatcaattgaagatgagactcattggaaaagccttcttttatactgtatttgaccatattgatcagcggttcaaaatagccgtttacattataaagtccgatcggtttttgatgaatgccgatctgggtccagcacagcacttcaaacaattcttcatatgttccgaatccgccgggcatggcaatatagccgtcagccagctcactcattttcgctttccgctcatgcatgccgctgacttcaatcagctccgtcagattctgatgaacaatctctccgctgaacagtccgctcggcatgacaccgacagcttttccgccgcctgccattaacgcatcggcaacggttcccataagaccgacccgtgaaccgccgtaaacaaggccgattccctgctccgccatatattcaccgagttcggccgctttgcgtttgtactcttcatttacccccgggtttgaccccgcaaatacacaaatggttttcattttttcatctccgcatctatatatgtacatcaaaaaatcaaaacacactatatattgtcccatctctatatgataatatcaataagaatcatacaggacataaggagtgtttcacatgcagatggctgaaacggaacaatggatgaaagacttttacgaaaaaagaggatggacggaatacgggccatttatcagaatcggctttttaatggaagaagcgggtgagctcgcccgggcggtaagagcatatgaaatcgggagagaccggccggatgaaaaggacgcgacacaggctgaacgcaggcaggagctgattgaagaaatgggtgatgtcctcggaaacctcgccatcctcgccgataagtacgggatcaccttagaagaggcgatgaaagcccatcaggaaaaactgatcaaacgctttgaaaccaaataaaaacacggcctgtccgtttttttcttggacaggccgcgcctgaatttatcccgttatctcgtcctgatgttcaaagaagtgctgttttccgattttatggaacagccccgttttacggatcagctccctcggctgtgattgcaatccgacgatcatcaatctgccgttatggcgtttgatccgattcatcacattccccagcaccgcttctgcggaggtatccatgtaatgcacattattcatcagcagaataagcgtcttcggcttttcctgaagcctctccagcaatgacgattccaatgaatcaatggaaccgaaaaacagcggcccttcaatggaatatgtgctgacggatgaatcatttttcaccgatttgacggcggcatgcggtgttttgatgcttgtcgattcgctcattttcctgataaagaaaacaaaagcgagcacgagaccggcggaaacgccgatgattaaatcaaacagaaccgtcagcaaaaaggtaaccgccagcacgaatgaatcagtgtttttcagccgcatcatattggcgacttccctccgctcgctcatgttccaagccacaaccatcaacaccggcgccatgcttgccagcggtacatgaacggcaagcggtgcgaagacgagcaggacgagaaggacggtgactccgtggacaataccggaaatcggagaaactgcgccgtttttaatatttgtggcggtccgcgcaatcgctcccgttgccggtatgccgccgaaaagcggcgcggccatattggcgatgccctgcccgacaagctccctattgctgtcatgccgtgatcctttcatattatccgcgaccatcgctgataagatggactcaagtccgccgagaagcgcaatgatcagagccgacggaaacatcataatcatgttatcaatggagaaatccggaagctgcaaagccgggagcgacctcggaatttctccgtaagcagaaccgattgtcgccatcctgtcaggaaaaaacacaaccgccgcggctgtagatacaagcagcgccacaagcgcgccgggaatcttcggcatcagccttgctgataacagcaaaatggccaaagcgataccggcgatgaaaatgctgtacaaattaaaggtttcgagcttcttgccgatctccgcaatgttgaggataaagctttcatgcttttgaacattgcgcagaccgagaaaatgggcaatctgctccgagaagatcagcaccgcgattccggccgtaaatccgacgatcaccggcttcggcacgaatttcataatcttcccgagtttaaatacgccgaacaggacgagcatcacgcctgccataaaaccggctacaagtaaattctcaaaaccatactgcatcacaatggcaaataaaatgggaacaaacgcccccgtgggccccccgatctgatacttagagccgcccaacagtgaaatcagaattccggccacaataacggtataaagcccgtattccggaccgacccccgaggcgatggcaaaagccattcccagaggaattgctacaatcccaaccacaattcccgcgatcaagtctttctgaaatttctgcaaattgtatccctgatatctgccggaaaattgcatcgtcagctgcatccccctttgaccgtttcataaccgtcaacgacaacatccagcgtccccgtccccggatcgatcacaagcccgtgcacaggcacctcttcaggcaagagcggatgatgcctgaccatattcacgctgtgtgccacgctttcttcaacgctgtgaaaaccggtcagccatgtttccaagtcgactcccgcatgctcaagaaggctgagacatttctcctccacgccgcgatcttttgctttatttaatatggaagccgcatttaaccccgacattccgcactcgcggtgccctacgatacagacttcctcagcttccagttcataaacggcaaccaaaatactccgcatgacacttccaaatgggtgagaaacaatggcccccgcgttttttatgattttggcatcaccgtttctgagtcccatcgcctgcggcagaagctccgtcagccttgtatccatacaggatacgatgacaagcttttttttcgggaattttgtcgtttggtaaggctcatatttcctttcttggacaaactgctggttgtgctccaaaatgcttgataaagaaaccatttttctaatcatctcccatccgattgtattgcaagccttcttacccagcttacagtaaggaattatagcacagaaaaaggcgtggaaaaggctttcaaaaaaagacacgataatttaactgtaaattcagattatattcatttatatctttcaaaaataataaaatttatctttataccaacctataaagcttttgaaagcagccgtttcgctcattctgccttcagaaatataggcggattctgttatggtttgggggaaataccttttcctcttttcattttaagttcaaaagaaccagaaatttattcaaatgtgtttgaatatttctcactttaccgcttctcttttataataaaatagagaagaaagacaaaggaggagaagcccgttgaaaccatatgtattcatcgcgaaaccgataccgccggaagtcgaacaaatgataggcgaacattgccgctatgacatctggaaagaagataccatttcaaaagaagaactgtacgaaaaaatgaaggatgctgaaggcctgctgacatccggaacggcgattgacagtgatttactcgatcacgcgccgaagctgaaggtcgtcagcaataattcagtcggctacgataattttaatatagaagaaatgaaaaaacgcggggtcgtcggcacgcatacgccatacaccttggacgacactgttgctgatctggctttttcattaatcctgtcttccgccagacgggttgccgaattggatcgattcgtccgcgccggcaaatggggaactgttgaggaagaatcccttttcggtatggatgtccaccatcagacgttaggaattatcggcatgggcagaatcggtgaacaagccgccaaacgggcaaaattcggctttgatatggacgtgttatactataaccgcagcagaaaaccggatgctgagaaagagcttggcgttacatatgccgacttagacacactgctgaaaacgtcagactttgtgctgttaattacgccgcttactgacgaaacgtatcatatgatgggagaacgggaattcagactgatgaaagatacggcatttttcgtcaatatttcccggggaaagacggttgatgagaaagcgctcatccgcgcattgcaggagggctggataaaaggcgccggtttagatgtgtttgaaaaagagccggtctcagaagacaatccgcttttacagctggaaaacgtcacattgcttccgcatatcgggtcagcaacggctaaaatccgcttgaatatgttcacacaagccgctcaaaacatgattgacgccgtatacggaagaacgccgaaaaaccttactaaggaatttcaataagaagaaaaatcccggttggttcagccggggtttatttttcgctagataaaaagtactatttttaaattctttctattcctttctttcgttgctgatacaatgaaaaggaatcagcttcacatgatgaaaatgggaggtattgctttgaaaaaacgattatcgtggatttccgtttgtttactggtgcttgtctccgcggcggggatgctgttttcaacagctgccaaaacggaaacatcttctcacaaggcacacacagaagcacaggttatcaacacgtttgacggggttgcggattatcttcagacatatcataagctacctgataattacattacaaaatcagaagcacaagccctcggctgggtggcatcaaaagggaaccttgcagacgtcgctccggggaaaagcatcggcggagacatcttctcaaacagggaaggcaaactcccgggcaaaagcggacgaacatggcgtgaagcggatattaactatacatcaggcttcagaaattcagaccggattctttactcaagcgactggctgatttacaaaacaacggaccattatcagacctttacaaaaatcagataacgaaaaaaacggcttccctgcgggaggccgtttttttcagctttacataaagtgtgtaataaatttttcttcaaactctgatcggtcaatttcacttttttccgccgggccatcgtgtttttgaatcgttacattgcgttcagacagaaccatgtgcccctccggcgtccgcttagaagcaagcaggcgtttattgaatggagaccgctcatgttcaaagatcgtttgtttcatggccttgaggtccttttcaccgatttcttcaagtgaaaatgcgtaacctgtctgccagccgtcccctttgttcattcaagcacgtgtgtcccgaattccgtttgttcttttctcacacgaaacgctccggcggcagataccgcctcggcgccggacagcggaacgggctgcatagcgagattgaggccgaagcctgtatcagcgatatattcatttccttcggcggaaagaagcacggccgcatgtgtgccgggcagctcccatccgttgttccagaccgttccgcgaatcaatttgacgtcaaatcctgcgtctttcagtatgaaataaagcagtccgttcaagtcataacaaagtccgccatgaagctcttttaccatatgccgccacagtccttctttcgtgacgtcatattcttttttggacaaaaccgcgcgattttcaaacggaaaccgatacgcgagcgcttttaaaaattcgggcaggctgctgaaatcgagtgactccttttcccagcctatcgtttgataacaatctttcaggaactcattcatcgttccgtcctccttacaaagcgcttacacttcttcctgcacgtaagcggacagcttttcaagcgcttccttttcatcctcgccttcagcgatcagagtgacttccgtccccgtgctgaccgccaggctcattaatcccataatgcttttggcattcactttcttgccgtttttctcaagaaacacatctgatgtaaagcgatttgcctcctgtacaaacaatgcagcgggacgcgcctgcaatcccgtctttaaacgcacttccactttctcctgaaccataagatctccccttttctgtacggttatttcaaagtgatgctttgtcctgtacgcagctgttctgcgatttcatcgagctttctcagcctgtgattgatgccggatttgctgattttcccgcttgcaaccatttccccaagttctttcagcgtgacttcctgataatcaatccgcagctgcgcaatttcgcgaagcttttccggcagcgcttcaagaccgatccgctcatcaatgtatttaatattttccacctgtctgagcgaagccccgatggttttgtttaagttggctgtttcacaatttacgaggcggttcactgagtttctcatatctctgacaatccgcacatcttcaaagcgcagcagtgaattgtgggcgccgatgacattcagaaattcggtgattttttccgcctcttttaagtacgtaatatagccttttttccgttcaagcgttttgctgttcagatgaaattcattcagcagcgcgcataatgaatcgttatgttccttataaagcgaaaagatttccaagtggtatgacgatgtttcgggattattcacagatccccccgccaaaaacgcccctctcatataagaacgtttgcagcaccgtttcgccaccagttcctcagaaatattccgttcgaatacaaagttctctccgaggattttcaattcctccagaatcagctttgcgttttcagaaaagcgtacaatataaacattgttttttttcagccgcattttttttctgactaacagttcgaccgatacatcatattgtttcttcagcaatgtataaatgcggcgggcaatcgccgcattttcggtttgaacgtcaagcacgagatggcggtttgaaaatgacagtgaaccgttcatccgaatcagagcggacagctccgccttggcgcagcagtcctttacttccagattcgtcagttctttttttgtttccgatgcaaatgacatatgagccacctcatttcaaaagacctctagtcccttaataaatcaacgagaagagaagccactttatgtgtatcgtgacggattacgccatttttatacgtgataatctggtccctgatgacctcaagccccatggctttcagcttttcaacgttaaattcaacgggccgggccagctctttcgcatatttgcttttgatttcgtcagggatatcttcattattgattaaaatcgtgtcgataaacggctgctccatatgatcgttcagcgccttaacatggtcggccgcgctgtattgaagcgtttcaccgggctgggtcatgacgttgcagatatatacttttttggccgcagccttgacgacttcctcgccgattttcggcacgagcagattcggaagaatgcttgtgtacaggcttcccggaccgataatgattaaatcggcctggcggattacctcaatcgtttccggcagcggatcaattttttcaggcgtaaggaacacccgtttaatgcgctggccgtaagaagggattgtcgattctccggagacgacctgcccgtcctccatttcggcgtgaagaacgacactggtattggcagccggcagcactctgccgcggacattcagcaccttgctcatttcggtgacagcatgaaaaaaatcaccggttatatttgtcattgctgccaaaatcaaattgccaagcgaatgtccggttaaatcgcttcctttgttgaaacggtgctgaaacagattttcaacgagcggctcaacatctgacaaagcggccagtacgttacggatgtcacccggcggcggaatttgaagttcatcccgcagacggcctgaacttccgccgtcatcagcaactgtcacaatcgccgtaatatcaacgggcttatgctttaatccccgaagcagcacggacagacccgttccgccgccgaagattgcgattttcggcttcttattcatttccggcttctcttttcaatgtcccggtgagtgacatgagtatagaaatcctttttaaaataatcagccagatactcagcgagtgtaacggagcggtgctggccgcccgtacagccgatcgcgatgacaagctggctttttccttcacgcttataggacggaagcataaagctgagcagatcaacaagcttttcgataaacttttgggtttcgttccacttcatcacataggatgacacttcctcatctttccccgtaagcggcctcatgctttcaatgtagaacggattcggcagaaaccttacatcaaacacgaggtcggcatctatcggaaggccgtatttgaaaccgaatgacatcacgttcactgtaaatgtttcaccttggttcgtggcgaaatgcgccacgattttttcacgcagatcacgcggtttcatatccgatgtgtcatatatcagctgagaacgccctttcaattcttcaagcagctggcgttccagcgcgattccttcaagaggaagccccgtagcggccagcggatgagaacgtctcgtttctttatatctcgtcacaaggatggaatccttagcgtctaaaaagagaatgcgcggtgtaatccacggattttccgccatttcatccagcgcctcaatcagcctgtcaaaaaattcacgtccccgcagatccatgacaagcgcgaccttgctcatttttgaacttgattctttcatcagctccaaaaatttcggcagcaaggaaggcggcagattgtcgacgcaaaaatagccgagatcctcaaagctttggatggcgacggttttccccgctccagacattcccgttataatgacgagctgaatatcatgattttcattcacactcatctttctcccccctgcggtctttcttttatttgatgagctgcggatctaaacgatagctgagcagctcgaagtccggcgtatacgtaaaggtgccgtgcaaaagcccttggcccttgatcataaaatcaagaatatgcccgtctccgggtgccatcggaaggctgtggatatcttttacgtcatgccacttcagaacgccttcctctgattcagcgacattccgtcccgtataggaatcggcgacaaaagtaaacatcatccactctgacacgatttgttcctgttccttaataataaaggtaaacacgccttttaactgcggatttaatatataaatacccgtctcttctctgtactctctgatgacggaatctctgactgattcgccgctctccatcttcccgccgggcgcgacccaccagccccgtctcggcttttggagaaggagaacctggtcatctgcctgcagcacacaatttgtcactctttgcacaagtacgtcacctaaccttctcaacaaatcatcgtctcttcattataccgtttcggcatgtctctcacaatgcagagacaccgacatccttttcttttatttgacagaaaaccaaaaatcgcaaaaaaagggcacggatactgaaatccgtgccaaggtgtattcatataaaaagggggtcaattactacattcatcttaaaacatcagtatttcacccgtgttacagcggaattaaaacccagtaacgattcaaaaactgaacattacagtgatgattaaacggttttgagcgtctcctgaagctcttccacataatgctgaacgctttgagccgcaatacttccgtcacctgtcgccgttacgatctggcggagtgatttttcacggatgtctccagcggcgaaaatgccgggaacttttgtttccatttgatcatttgtttcaatgtagccctcttcatttgtgatgcccaagttttcaaatggtttagaaagcggaagcatgccgatataaataaagacgccgtcagctttgaattcttcctcttctcccgtcacagtatccacaagcgtaagtctgccgacttttccgttttcttcatgaatttcttttacggttttattccatttgaaatcaattttctcgttgtcaaaggcacgcgcctggagaatgctttgcgcacgcaatttatcgcgtctgtgaacgatggtgacttttgaagcaaagcgtgtcagatagacgccttcttccacggcggagtctccgccgccgacaacgacaagctctttatttttaaagaatgcgccgtcacatactgcacagtacgatacaccgcggccgccaagttctttttcaccgggaacgccgatctttttgtattccgctccggcagaaatcacgatggctcgcgctttaaattcttttgaaccggctttgactgttttatattctttgccgtcaacaatttctttaatatcgccgtacgcatattccgcaccgaattttttcgcatgttcaaacattttatttgaaagttcagggccgagaatgctttcaaaacccggatagttttcaacatcctccgtgttggccatctggccgcccggaattcctctttcgatcattaatgtggataaattcgctcgtgatgtgtaaacagcagcggtcatccccgccggacccgcgccgataatgatcacatcataaattttttcttctgacaccatgattcactccttttcgaaatggggcaccccctatatgaataagaatccccatcaatcgtattccttacccatatcctataaaatctgagagcgattcgctatttttttgctcatttttctaagaaaccgtgattaggcagctcctgccccgggtatacaaataaagaaagagccctccgggatggaaggcccttgtgttattcattattgcacgacacgtcttacattgccgttgaatgcttttttccagtaagggttgctcattgaatcaatagatacaccatgtgatgtattatcgttcaggaacgttccgttacctaagtagatgccgacgtggccgtttgttttatacgtattgaagaatactaagtctccgcgtttcatgtcagacgcgctgactgctttacctcttccgattagcgtatctgtgtttgttccgcttgcaggtccgaggttaacgcccgcgttagcgaaagcccagcgtacaaatgaagagcagtcaaaaatacggttgttgatatcagattgcgtgcgtccgccgccgaatttgtacggagattgacccacaaggcttgatcctacgctgatcgcgccttcaataccgcctgaatttgaaataacagatccgtcagaatcatctgaaccgccgctgttatgagatgatccgcctgaattgctcggtttgcttgagctgtcagatgaatcggatgtttcagttgaaacagccgcttttttcacagttttaaccgcaggtgccggctggctgtcatctttttggttttggtcttcagaggctttttgcgcttcttcctgttttttgatcagggcagctgctgcagcctgctcttctttaatgcgcttctgttctttttcagtgtcagctttttcgtttgcaagctgtgacgcttcttttttcagatcagagatagcggaagccgcttttttctgaccgtttttcgcttcgtcgaaaagcttgtctttctgatcaagctgtttgttcaggtctttttgcatagactctaacttcgcaagatcatcttggacttttttaagcttcacgttaagttcagcttcagcatcttcgagtttcgctttatcctgctcctgctgtttgatcaggtctttatccgcatcaacgatagaagataccgcagtcgcacgggaaatgaaatctccgaagcttgtcgctcctaaaagaacgtcaatgtatccttgagaaccgccgttttcctgtaaagaacgaacgcgttttttcaggatttcattgcgtttttcaatgcgcgcttctgtttctttgatttcttttttcaaatcagcgatttgctttttcgttttttcgttttcagcttttttatcttcgattttattacttgtatccaacgctttggcgttaatgtctttcagttctttttcaatcttagcctgcttgtcctgaagcttagataattccttttctttcgcttcgaggcttgaagccacctcagattgcttgctttcgatttttgcttttttgctgtctaatgtttccgccgatacagtttttgtaaacgggatcaaaaaactgcttgtcccgatgacggaagccaaaccaagtgttaataaactctttttcactttttctttcctcccttttactttaaaacctgttctcatttggaattctattatgaacatcaaagttacgctccctcacataccgtgaggctgatgatttttatgtatgaatctttgaaactggttaattggtatagattatacagcacatgtaaaaaaaactaatctcttatgtacgagaatcattataccatcatgtttcgacaatttttattacagttatatttcaatgtgattgcaaaattcatcatttgcaaaataaatgatgattgcggtctgtttttgattcaaaaagcaaaaaaatacgtatgaaaatctcttttttcggcagtaaagttctgttttatcactttctgataaaaaaagaaccgactctttatatagaaagaatcggttttattctaatatatcatctatttgtctgatgtattttgagagtgttgccgcggatataccgtaaacggcggcggtttcttttttcgtcgttttttcgccgtttgcttccttccatacgtatgcaatggctgcggcccatgcccgctcattctgtacggcagcagcagcgcggatgtgctgaataacgtgaaaaacccagcagctcatgacgtcagtctttaaactgtcggcttccgctttctccagcagcttgaccgtccgatacgtgaacaaagcatcacgggagacgcctgaagcgcctttttcaccggaaagcagcagtctgacgaattcctgttcaaacggcgtagcggctcgttttgcagccagaactttttcaagctggtgccgctctccttgagcgctgctgatataataggcggcgagccgctgttcaagtgaagcaggcagcggttcctgccgctccgcccaaggcgcggggcggtctgattcgggaaattcagtttcggcctttctccaaatggtttcggcaaattctgtacggcctgtcccgtatgctgaggcggcaagccagtaataaaacgtgtcgtcgccttcaaatccgcttttgtatagagaacggagccacttatagccaagatcatgtctgccgacaagcgcaagcgtcgcccccagcttgtaacgctgttcgaataatatcggatacacattggcgagcctttcgctcaattctccgactttttcatcttccctctcgtaatagcagaatacaaggtagttgcacagggcgtggagattgccttcgtttttctcaagcacttcaaataccgtctgtttcgcttttgttacattgcctgagtaaaaataagcgagcgccaggttgttgtatgcggaccaaagctcggggtaatcggctgtaatctcttcaagcatgacaaccgcttcatgaagctggccgctctcaagaagcgcttttgcccggtcctgcctgatcagcagttcatcttggtcatagagcgattcgttttcacccgcttcgccgaaatccagaagctccatcaggttttcaatctcttcgctgaattctccgtccggatcggcatcagaataagccgccgcttctttgtatgcttcctgaaagagccccaaatgcgcgaaattattcgctttaaaataatgacactcgggcatttcttctttcaggttcaccaaaataaagtcgaacagctcatttgactgctggtagtgccccatttcagaataaatgacggccagccgggacagcatttcggaatcattcggttcgagatgaacggctcgctgaatcagtttgctggcccgttttaaattccgctctttatatgcttttaagcctttatgaaaaaaatattgtccatcctgaagcagctggacaatttgtgcgtgctttttatgttcagaagtgtgttttcccacaaataccctccgttttatacgtattaccgtcagtagtataccataaaacggtttcgcctcaatagttcaaaagacaggatcggcttcgttttttactggctggttcgaccagattttagctgtttgtttcatgagggtcggcaggaagaatgacgcggaaaagggttccttcgccgcgcttgctttcaacctctatcgaaccgccgtgcagctcagcgatttttttggcgatggacaggccgagcccgcttccccccgcgtttctcgctttatccgctttataaaaccgttcaaatacgcgctctgcctgctcaggctccattccgattccgttgtcggcgatttcgatggccgcagcctccggcaaatctgtaattttaacggatatgcggcctccttctccggtaaatttcacagcattgtgaatgagattcatccagacttggctgagcagcgcttcatctccgtacacatacgactcctgtaaatcaatgagaaactcaatctgtttggcggaccactctggctcacaagtcaatatggtgcgccgcagctgtttgtcaatgcggaacggttttttttgtatcggttcggtctgacgttcgagtgcggtgagcttcagcagattttcactgatttttgataatcgttctgtttctgtctcgatgatgtgtaagtagcgcccccgctcctcatatgataaatccggtttttttaagaggtgcgcatagccctttaatgaagtaagcggggtttgaatttcatgggaaacgtttgaaataaattcttgtttcagtttttccatttcactcagttccgcggcgagtgtcgacagttcatcagccaacttcgtcacggggtgatcccgctcaattttctccattttccgggaagcggccgcggtgaagttgccgctcgacatttgcttgatcgtggcggtgagcgaatcccagatcgcatgatgtcgtttacgcgctgactttgaaaaaataaacatcgttaaaaacagcaggccgaacacaagccaaagtgtcagaatttgctcgacgaacggcgtcagcaaaattggccatataacaccgaagccctgaacgatcaagtgggcagcaagccataaaaatgcagtgaatacgagaaggatgatgattcttcccgccgttctgagaatccgtttcattctgtcaccacaaaccggtagccgagaccccgcaccgtatgaatggcaaacggatagtccttttcaggaaaccgttctctcagccttttaatatgaacgtcaaccgtccgctcgtcaccttcataatcaaagccccaaatatcttctattaaatgctctcttgaaaacgtcttattcggataaccggcgagcttaaataaaagctcaaattcacgccggggcagcgtcattcccgaaccgccgccgcgcgttacagtacgggattgcttatctaatgtgaccgttccgatggtcagcagtttttcagcggtgatccggtagcgtttcagcaatgctttgacccttgcttccagctcaagcggctcaaacggtttgacgagataatcgtccgctccggaagtaaaaccctgcactttatccagcgtttcgccttttgccgtcagcatcaaaatcggaatatccgtaaagctgcggacggcttcactgacttcaaatccgtccattttcggcatcatcacatccagtatgatgagatcaatatgtgttgattctatcagctgcaccgccgcttccccgtcttccgcttctgcgacgtcaaatccgctctgctccatcataaggcggacaagctcacggatatggcggtcatcatccgcaaccaatatgacagccatgaaaatccctccttctgctttttcaaattttttagtctcctgtatcttcagcagactctcaaaacggtccgtcactgtgccatatcggctaagctgtaaaataaaaagcagcttttcagctgctttcttttcataaagtcttgctttacacagctttgttttctaagtcggcattcagcttcagctgctgctccgcaaaatcacggtacagcgaatgggatgccattaattcatggtgtgtgccccgtccggtgatttcaccctgttcgacaaagagaagctgatctgcatccacaaccgtggataagcggtgggcgatcacgatggtggtgcggccttccatcaagacttccagcgcctgttgcacccatttttcagattggctgtccagacttgatgtcgcttcatcaagcataagaatgctcggattgcggagaagcgctctggcaatggcgatgcgctggcgctgtccgcctgacagcataatcccccgttcaccgacctcggtttcaaatttcttcggtaaatcttcaataaattgcagggcgtaggccatgtcggccgcttttctcagttcctcatcggtcacctcgcgttttaatccgtagcagatattgtcgcggatggtgcctgacattaacggactttcttgagacacgtagccgatatgctcccgccatgattcaagggaatacgtatcaatcggttcattcccgagcaggatactgccggccgtcggattgtagaatcgttcaagcagtttaaataacgttgtttttccgccgccgctcggtccgacaatcgcagtgactttgccggcctcaatcgttgccgtaatgtcttttaagatggtttgatctgttttgtagccgaatgagacttgttcaagcttaatcggctgatccgcgttttcaatcgctttcccggtctggatgtcttcttctttttctgcaagaatatgaatcatccgttctgttgcgccgacggatttttgaagctgtgtgaaaaatgaagtaatctggcccatcggcataatgatctgaaacaaatacaggataaaggcaacgagtgcgccggctgtcagttcacctgatgatacctgcattccgccgtacccgatgacagcgaccagcgccgccattaatacgagtgtgataagcgggcctacaagtgactgcaccttcgcttcacgcagaccgagtttaaagagcgccatgatgcccgcttttccgcggccgtattccgcttcttcagcgtttgacgctttcacaagcctgatttccgggaggatgtggttcaacaatccggtgaatctcgctgtttcatcctgtgtttcccgagatattttaaacattttccggccgatcggcactaaaataaccgcagccagcggcacgacgatcagcacgagcaatgtcagcttccagttcatgataaataagatcgtcagtgatccgataacggaaatgattccggtaataaatccgctgatattgtttgtgatcagctcttttaccaccatcgtgtcattggtgacacggctgatcgtttcgcccgtggcgtttttgtcaaaataagagacgggcagtttaattaatttctgccataacaaatcacgcagccccgagatgattttctggccgctgtagttcaaggcgtatgtggcgtaggcgcttaatgcggcctgtacgataaatacggctgcgatgatcccgatttgcatgcctgacagcgacgacatggaaaaaccgtcaacgagctgctttgtcaatagcggaatcagcaggctgacgagcgttgtcacaatactgagagacagcgcgaaggccagcattccgtatgatggttttgtttttttgactaatgaaaagaatgaactgaatttcccttttggtttcggttgtttattcggcatatgttttcctcctatatcactgtttatactataacggatgagcatgaacggaatatgaacaaaacgtacatttttaataaaaaccaaaataaactctattagtcaatattatcaaattcatctgcctccggttgagaaataaggaatattttaatgaatgtttaggtttggcatgtaaaaaacctcacgaatctctccgtgaggtttgttttactcagatgacgaatggcgtttcgcaaggacggcaagcacgtcgtccagaggaagcgactgctctcgcaatagaacgagcaaatgataaagcaaatccgccgcttcccattttaattcttcatgatcgcggtttttcgcggcaataataacctctgcggcttcttcgccgacttttttgaggattttatcgacaccttcccgaaacaggtacgttgtgtaagccccgtcaggcatctccgtctgccgtttggcgattacgctttccagttcatttaagatgccgaaacgatcctgcacgtccgctttttccggagtaaagcagctgtagcttcccttgtggcatgcgggtcctgaaggctccgccagcacgacaagggcgtcttgatcacaatcatagcggatagcttttaccttttgggtattccccgacgtcgctcctttatgccacagctcctgccgtgaacggctgtaaaaccaggtttctttcgtttctatcgttttttcatatgattcacgattcatataagccagtgtcagcacttctttgcttgccgcatcctgtacgatggcgggaatcagtccggcctcgtcaaaccgcagttcatctgcccgtttcatctcacattcaccccgtgtttcttcatataatctttcacttcttttatcgatgtttctttgtaatgaaatattgaagctgcaagcgcggcgtccgcttcaccgatcgtaaacgcttcaagcatatggcgcgcgctgccggctccccctgacgcaatgacgggcaccgggacggcacgtgtaacaagctttgtgagcgtatggttaaagcccgttttctctccgtctgcgtccatgcttgtcagcaagatttcacccgcaccccggctgacggcttcttttgcccaggctgtgacttcccactcggttttctttctgccgccgtgtgtgtacactttatagcaacccgagtcttcgtcatactttgcgtcgatcgccgctacgatgcattgcgagccgaaaaagtccgccccttccgtaatcagctcgggccggaggacggccgctgtattaacggatactttatcagcgccggcgcgaagcattcgtttcatatcgcttaattgattgattccgccgccgaccgtaaacggaattgccagttttgcagcaacttgttcaacgacgtctgtcatcgtcttgcggccttcatgagaagcggaaatgtcgagaaaaacgagctcgtcagcgccctccctgtcatatgcttcagccagctcgacaggatcgccggcatctttcagcccgagaaattgaatgcctttgaccacgcgtccttctttcacatcaagacacggaatgattcgtttcgttatcatgcgtccctcaccccgctgagcgcttcggccaatgtaaattgtttagtatacagcgcttttccgataatcgctcccgatacaccggcgtctttgtagcgggccagcgcttttagatcagcgactgagctgaccccgcctgaagcgatgacggtttttcccgttgcttttgcgagctggacggtgctttcaatgttcggtcctgacagcatgccgtcagttgcaatatccgtgaaaatgaaggtttccgctccttccacagccaattcacggcccagatcggccgctcttacggaggatgtttccagccagccttccgtcgagacatacccgttcctcgcatcgagaccgatggcgattttcccgccgtattgtttcagcatgcttttcacaaacgccggatcagaaacggccgaactgccgagaatgacacgatcggcgccttgtgataagtaaccgtacacgtctgcttcagaacggatgccgccgccgatctcgactttgacatcaagctgctgcacgatgtcaagaacatgccggtcatttactttcttgcctgctttcgcgccgtcaagatccacaagatgaatccattccgcaccttcttttgcaaattgcgccgccatgtctaaaggcgagtctccgtatattgtttccttgccgtaatcaccttggatgagccggacgcatttgccgtttctcatatcgattgccggatataatgtaaaagcgctcatttcttcaccttctgttccgctgccatttttgtaaattgtgttaggatcgccattccggccgagccgcttttttccgggtgaaactgcgtcccaaagacattgcgtttcccgacgaccgcgggtactcgaacgccgtactcggcacttgccagaagatctccgtcttccatcccgtctatataataggaatggacaaagtaaacgaagccttcttccgcttttgaaagcaaaggagacgtttggtgaaacgtcagccgattccagcccatatgcggcaccttcagcttgtttccttcagcgtccctgtcttttagtctcactgcttttccggctaataagccaagtccttttgcagtgccgttttcgctgcttttttcgaaaataagctgcatgccgaggcagatgccgagaagcagcttcccctcctcaaccatgcggtgaatgaatcgatcaagcttcatgctgtgtaaattgtccatggcgtcactgaacgatccgacaccgggaagaataaaagcatccgctttttccagctcttccggccggtctgatacgagatacgggacgccgacgcgttccagcgcctttgacacgctgaataaattgcccattccgtaatcaattacaccgatcatttacagcattcctttcgttgatggtacacccttaacccgcggatcaatggatgacgcttcatccagcgctctgccaagcgccttaaacacggcttctatcatatggtgggtattcgtaccgtaatgaacgatcacgtgcagattcattctcgcttcgagcgccagtttccataaaaattcatgtacaagctcggtatcaaacgtgccgactttcgcttgcggaaatgcagcgcgcatctcaaggtgcggccggttgctcaggtctacggcaacttgggcgagcgcttcgtccatcggcacaagcgctgatccgtaccgtttgatgccttttttatcaccaagcgcttccaaaagagcctgccctaagcagatgccgatatcttcagtcgtgtggtgatcatctatttccgtatcgccttttgcatcaacggttaaattgaattgcccgtgctttgtaaacaaatcaagcatatgggtcataaacggcacatccgtgctgatatctgctcttccttctccgtctatcccgaaagccagcttaatatccgtctcatttgtttttctggcgcgttccgcttttctcatcggtcacttcctccgtttctcgcttcaatcgattttgcgtgcgcttcaagcccttccagtctcgcgaaggcggcaatgctgtccgcatgggattcaaaagccttcctgctgtaagagatgatgctcgatttcttttgaaaatctgtgacattcagcgggcttgaaaaccgtgccgtgccgtttgtcggcagaacgtgattcggtccggcaaaataatctcccaccggttcagcgctgtatcgtcctaagaaaatcgctcccgcgtgtctgatgcttccaagcaaagcctccggcgaatgcgtcatgatttctaaatgctcgggcgccagcgcgttcaccgtgtctatcgcatcctccatcgattccgagatataaatgcgcccgtgatccatgatcgacgcttcggcgatctctttacgcggcagcgtctgaagctgtttatccacctcatcggataccgcttcggcaagcttccttgaatcggtgacaagcacgcttgagctgagcatatcgtgttcggcttgtgaaagcaggtcagcggcgacttcttgcggcaccgccgtatcgtctgccaggaccacgatttcactgggaccggcaatcatgtcaatatccacatcaccgaagacttcgcgcttcgcgagtgccacaaatatattgccggggcccgtaatcttatcaacaggctgtatcgtgtccgttccgtaagcgagcgcggcaatcgcctgtgcgccccccgctttgtaaatttcatttatcccgagctcagacgccgcaaccagaacgcccggcgaaaggcggccgtcttttcccggagggctgacgagaacgatccgctccactcccgcagcaagagcggggatgacattcattaaaacggaggacggataagcggccgtcccgcccggcacatatacgcccgcggaatcgagcgccgttattttctgtccgagcatcgtgccgtctttgcggtggtaaaaccaagaggattgcagctggcgctcgtgatattctttaatattggcaattgcctgcctgatcacttccagcagctgatcatcaagcagacggtacgcctcggcgatttcgtccccgctcaccgccatctggtccaggctgatcccgtcaaatgtttttgtataggccaaaacggctttgtcgccgttttttctgacgtcttcaataatcgctctgacggtttttcgctgctcttcggttccgctgtcaatagaacgcttcagtgaaaaccgctcgcttttttttattgcggttattttcattttgccgtgtctccttccacaacccttgccagcctggccgccatttcgtcgattacatcgtccttcatgcggtagctgaccgggttgacaataaaacgcgatgtgatgtcacaaatatgttccgactctacgagaccgttttcctttaatgtccgccctgttgatacgatatccacgattctgtcagcaagcccgattaaaggcgccaactcaatggaaccgttcagcttaatgatttccacctgctcgccctgttctctgaaataacttgacgcaacattcggatattttgtcgcaatcctcggagcgactccgttccaatccgctcccggaagccctgcaacggcgagatggcatttgctgatattcagatcgagcacctcatatacgtcacgctcttcttcaagcatgacatcctttccggcgataccggcatcagcgacgccatgctcgacatatgtcgtgacgtccatcggctttgccagaataaagcggagattttcttccggaacgtcgatgatcaattttctcgattcttcaaactccccgggcagcctgtatccggcctgcctcagcaatccggccgcttcctcaaatatccgtccttttggcatagccattgtgagtaccttacccattctgctcttcctttctggcaccgataaagtaggtgacgtttgcgaatgattttgtcatatgatcgatattttcaatgcccgccaaatcctgcaggacgacttttctgcctcttgccctttcttcctccgcgaataaaatggcctgcggccgctgctccttgctgaaaataacggcgtccgcatcacttgtttctccccggatgccgagcgcttcaatcagcctgtcgatacggagcccgaagcccgtggcgggagcagggctgccgaaatggccgagaagattgttataacggccgccgcttccgatgacaaacccgacatttgccgcgtacacttcgaataaaatccccgtgtagtaactcatatggcttaccatgttcagatcaaggcgaatatgctcggcacacccgtaatcttcaagaatgtcccacaggtctcccagctcctgaatcacgctttgcccggagatgccgatgatctcccccgctttggcgcagatctcttttccgccgcgcaattccagaagtccgagcagccggcttttgtctattgaagaaagcggaagcgacttgacatgttctttgtaccccacgtaattcttttcaaagagaaagcgccgcagaacatccgcccgctcggcatttcccaaaacctcgacaaacagctcatctgcgagcccggcatggccgatcgcgattttaaattggcgcaatcccgcgtttttcaaagcgccggccgcgagcgcaatcacctcggcatccgcgcttgttgatccatcgccgatcagctccgcgccgacctgttcgaattcagccggacgtccgccttcccgctcctgagcgcggtagacgcttgccgcgtaccccgctctgagcggatgattgtttttgtgcagcttagacgccgccaccctggcaatcggtccggtcatgtcaggccgaagcacaagcgtttttccgtcctgatcgagaagcttaaacagctgctgttcgtcaatggctgactgggcacccactgtttcatagaattcaagagtcggtgtctccataaactgataaccccatttatcaattaaatccgttagtgtggaacggactttcttctttgcttcgtataaaccgggcagcgtatctctcatgccatgcggtttctcaaacataaacattccctttagcacccccgctttttctgaagaaaaattccgaatcctttagttcgctaatatgataatatgttagcagataaaagaacggattgcaacgcccaatgtcctcctattctttcccataatcatgactaaatcatgaataaatctgtaaacatatcggaacaatccaatcaggttgaacagaaatgctataatacattaaatagcttcatcagaaacaagggagagtaatcatgaagacgcttggaacattatgtgtgctgattctgacagccgtccttgtctatctggggtacaacatctatacaaacgatatccatttgaattttttcaatcagcagtctgacgagcctgatgagaaaacaccattaaaagggagcgcatcaccactgaatgtcgttctgtacagacagatggattcacccagactgtacaatggctgtgaggtaacaagccttgctatgattttgaataatgccggatatcatgtatcaaaaaatacattggcggatcaaatcaatacggttccgctcacatacagcagcgggctgaaaggagatccgaacgaaggattcgccggagacatggagaacggcccgggtttaggcgtttatcatgagccgattgataaacttgccaaaaagtacgcgggaaacaaagtatatgaccttacgggaaaagacatttcttcagtgtaccggcagcttgaaaaaggacggccggtctgggtgattatcaccacttccttcaaaccggttgataatatgcagacttggaatacgccgaacggaaaagtcgacattacgtacagcatgcacagcgtagccgtcaccggttatgatcacgattatgtatacgtcaatgacccttatggctataaaaacagaaaaactgaccggactgaattcgaaaaagcctggaagcagatgggcagccaggccattgtgatcaagtcctaaaaaaaccccgctgacgttaatcagcggggtttcccattcgttttttcatttcttcgtccgtataaatcagcttcatcgggtttcctccgacaaacgccccggccgggacatctttgtgtacaagcgtgccggccgatacgacggctccgttcccgatggtaacgccgggcagaatcgttgtgtttgccccgatcatcacctcgtcaccgattgtgacaaaaccggtccggtactcatgtattaaatattcatgagccaaaatcgtcgtattgtagccaatgatgctgttttttccgacagtgattttttcgggaaacatgatatccggcattaccatcagcgcgaatgacgtctgttttccgaccttcattttcaaaaaggtgcggtacagccagttcttcacgcttagaaacggcgtataccttgcgatctgaatgatgatgaaatttttcatcaccttcagaaagggaaccgtctgataaacatgccacaatgaatttgcacctgaaaccggatggcggtctgtttttctcactgattacttcactccggtgatgtgcaataaatcactcattttctcaagcatataatcgggttcataagcggaaagcgcctgtgcgcccttaatcgtccacgcgacgccggctgttttcgtgccggcgtttttccccgccatgacatcgtgataattgtcaccgaccatcatggcttccgacggatcgcaccccagccggctgagcgcaagcctcacaggctcggggtcaggcttcgggtgctttacatcatcaagcgtgacgacagtatcgaaaaacgccccgatgcctgtcagcttcaatcccatattgactgtatccctcagctttgtggtgacaataccgagctgatagcccgcttttttcaattcatcaagcgtttcataaaccgtttcgtactccgtgacgagctcatcgtgcttttcatggttgaatgctctgtacatgctgatcatgtcatcgcacttttcggcattaatgcctgaaaacgtttcgtacagaggcgggccgataaacggaagcacatcttcccgtttatactgccccgggcaataatgatcaagcgtatgaagataagaagcgataatcagttcattcgtgtcaaccagcgtgccgtcgagatcgaataaaatggcggttaaacgtttatcagtcatcttatgtcctttccgatttcagacgtcagtctgtatccgcataccgcttttcggcataccctttcacacgtctgaaaatcattaaaataatcgcaagaacaatcagcacaatggaaataacctgcgcgatccgaagctggctcgtgagcatcaggctgtccgtccgcattccctcaataaagtatctgccgatcgaataccagataatatacgtcaaaaacagatcgcccctgcgcaggttcacgcggcggagcagaagcagaatcacgactcccgcaaagctccacagcgattcatacagaaaagtcgggtgataatattgtccgtctatgtacatctgattaatgatgaaatccgggaggtgcagactttccaaaaatgaacggctgaccgcttcgccgtgagcctcctggttgataaagttcccccagcgtccgatggcttggccgagcaaaatactcggtgcggcaatatccgcgagcttccagaatgaaatgcctcttacttttgaaaagacgatgcctgttgcgatcgcgccgattaatccgccgtgaatggcgatgccgcctttccaaattttaatgatttccccggggtgttccgagtaataactccactcgaaaagcacatagtatgcccgcgcgcaaatgattgcgatcggaatggcgaaaagaacaagatcaataaaaatgtcctttttcagcccccgcttttcactctccctcatggccatccaaagccctaataacgcacccgcaccgataatgattccgtaccagtgcacggataaaggcccgagctgcaaggcaatcggattgattggtgtacctgcttcgttcatatcattgccaactcctattcgtcttgttcgccgtcctcaatgacatccgccagcttattcgtaaattgctcggcggcatttaagcccatccgcttcaatctgaagttcatcgcggcaacttcgataataacggcgagatttcgccccgggcggacgggaatggtcagttttgtaatttccgtatcaatgattttcattttttcttcttccagcccgagacggtcgtattgtttcccttgctcccaaagctcaaggtccatgacgattgtgattcttttgttgcttctgacggcgcccgctccgaacagcgtcatgacatttataatgccgagccccctgatttcgagcagatgctcaatcagatcaggcgcattcccgacgagcgtgtcctgatcctcctgccggatttcgacgcagtcatccgcgacgaggcgatggccgcgtttgacgagctccagcgccgtttcacttttaccgacgccgctttttcccgtaatgagcacaccgacgccgtaaatatccacgagcacgccgtgaatggcggttgtcggcgcgagacggctctcaagaaaattcgtcagccggcttgacagtctggttgttttcagaggcgatctgagcaccggcacaccgtttttctcggacgcttctacaagctccggcggaatcggcatatctctggaaagtatgatagccggcgtcacatcggtgcacagcgattccatccgctgttttttatcttcctcaggaagctgatcgaaaaatgacagctccgtttttcctaaaagctgcacccgttctctcgggtaatatgtaaaataaccggcgatttcaataccgggccgtgataaatcactcatcgtaatcgggcggttaattccttcttctccgctgatcaattctaaatggaactgctccattacgtctttggtccgaacctttgccaagatatgttcctcctgttctgggatgttccgagctttgaacagttatattttatcactttaccgtctgaaccaaaacagatttatacaattccgggataactggtctagataactagtctgaaaaggagtaaaataaaactaacaactaaccagaaaggcgtgttttaaagtggctgaaagcttgttaatcagcggtgcggacatcgtaacagaagatgaaatcatccaaaacggatttctcggcataaaagacggcatcatttcttacgcgggtaaaacaagaccgcaagaaacgtatgagaaggaatggaaggcgcccgagggcacgtatgcgcttcccggaatgattgatatccatattcacggcggatacggcgcggatacgatggatgccgatttcgcggcgcttgatacaatggccgcccggctgcccgaagaaggaacaacctcttttttagcgacaacaattacacagcagcacgaaaatattgaaaaagcgctcgaaaacgccaaagaatggacggcatcttcacctcaggcgcataaaggcgctgagttgatcgggattcatttagaagggcctttcgtctctccggaaaaggcgggagcacagccgaaacaatggattaccccggccgataccgggctctttcagaaatgggaacatctttctggagggctgatcaaaattgtgacgcttgcgccggaagaagatcctgatttcagcctgatccgttatttaaaagaccggaacatcatcccctcaatgggacatacaaacgcgggagccgatcttttagaaaaagcggcggatgccggagcgctgcatatgacgcatctcttcaacgccatgagctgctttcatcaccgtgagccggggggcatcggtacggctctcgcctgcggccgcatcacggcggagctgatcactgacggtattcattcccatcctttagccgtaaagcttgcctttttggcgaaaggaagccaaaacctggtgatgattacagactccatgcgggcaaaagggctgaaggacggagaatacgaattcggcggacaaaaagtcaccgttcgcgggaacacggcgcttcttcctgacgggacgctggccggttccattttaaaaatgaatgaaggcgcagcgctcatgcgcaggtttacaaactgttcatggctggatatagcaaatatgacgtcggcaaatgcagcccgccgcctcggcatatttgaccgcaaaggaagcattgcggaaggaaaagacgccgacgttatactgacggacggacagtgcggcgtgctggcatccatttgccgcggaaacaccgcatatatttcaaaggaggctgattgggcatgaacatcatcacatgcagacattatgaagaattaagtgaaaaagccgcagcgattatcgctgaaacagtcaaacaaaagccggatgccgtcctgggccttgcgacgggaggcacccccgaaggcgtatacaaagaacttgtgcggaggcaccgctccgaaggtttgtcattccgggatatcacgacgatcaatcttgatgaatacgccggactttctcccgaggacaaaaacagctatcattattatatgaatacacatttttttgcacatatcgacagccgaaaggaccgccactttctccctgacggacgggcagacgatcttgatgctgaatgcgaacgctatgaccgattaattcaaacactcggcggagcggatattcagcttttaggcatcggacacaacggccatatcggctttaatgagcccgggacgccatttgaatccagaacccatgtcgttgagctgaatgaagagacaagacaggcgaatgcgcggtactttccgtcaatcgatcaagtccctgaaaaagctgtgacaatggggatcgggactatcttgtccggcaaacgcattttgatcatggcatccggaaaaagcaaggcccaagcggtgaaacagcttctggacggacgcgtcagtgaagcattccccgcctctgccctgcacgcacacccggatgtgacggtcttgattgatgaagaggctgcgggcggcgattgaaaggatttgacctatgcagattgataaacaatctccggttccgatttattttcagattatggaacagttgaaaacacaaatcaaaaacggcgagctgaaagcggatgcgctgcttccgtcggagcgggaatacgctgaacaattcggcatcagccgaatgacggtgcgccaggcgctttccaatttggtgaatgaaggatttttatacaggcagaaaggccggggaacgttcgtcagcaaactgaagatggaacagccgctccaagggctgacaagctttacggaagatatgaggagccgaggcatgaagccggggagcagacttgccgaataccagctgattcaggcgactgaagaattgtcttctattttaggatgcggccatcaggcaacgcttcataaaatcatccgcgtccggctggcgaatgatatcccgatggcgattgaagcctcgtacatcccgtttgacaaggcaggaaaactggacgcctcccattttcagtcatccatgtatgagcatatcgaagcgtacaatcagatgccgatctcacgcgccaaacaagagcttgaaccgggtgccgcttccgaagaagaagcggaactgctcggcatccagcccggcgcgcccgtcctctatataaagcggaccacttatctgcaggacggcactgcctttgagcacgtcaaatccgcatacagaggcgaccgctacacattcgtgcattatatggacagggtgaaatgaaacatctccaaccgtttcgggttggagatgtttttttgatctgccattttcaaatcaattctctatgactctgtcaaaacggagaggctggggttctggtatctatttttataaagaaaagggtaacaaaatgctaccctctgtttcggacaagatatggaacctgctttgaaatcagcagcagcggttctttgtttttgtgagccagtgaaaacataatcccgccttcaatcatcgagttgattgtcattccaagcttctccgcttcctcttgctcaaatccgtgctgaagaaatttttccgcgaacacatccgtccactgtttaaacacctcaacacatgtgcatcttaacgtttcatttatcagagctgtctcacccgctaacaaaccaaccggcactccctcaatattctgcggatcattaaactgttcagccgttacatgaataaagtgctgaatggcttcgacaggatccgcgaattgagtcatactattctgtatttgcttttcaacgcaccttcccgtatgtttgatcgctgcaatggcgagttcttcttttccgttcggaaagtgatgatatacagaccctctgggcgctccgctctcttttatgatttgattcaaacctgtcgcatggtatccctgaatttgaaaaaggtatgcagaggcttgaataattctttcttttgtcccggttttgctgttcattatgtttcctcctgcatattaagaaaaccaatcggttttaagtatagaaaagggacataaaaaagtcaaaaacacttatcaccgttgtgcgccgccattcgcgttacagaaaaaatcctgctgaccgtcagattttgttctgagcaatcagcaggcggtattcgcattatgggctggaagcatgcttaaaatcaaattgatccggagccgggtgatacggcgtttttcccgttttgaacatccagatcggcgatattgtttttccgttgtacggatccttgacgacggtgtaccagtaataaacggaatctggctgcaggccgtcccagacccaatgcgcggtttttccgcttttcacgtgttttttatgaccgagcagttcattcgtatagacgttgcattcaaaataatcggtcgctacctttttcattttcggctgtaaatccatttcagccgagaattcatctttatccgcgaacagatcggtgtcatagtaattgatgtcatccgtatacggcgagtaggagaacatgtgaacctgattggcggcctgatcgaattgcataatgcgcatatagccttgccccccttcagggccgtcctgataatcggtcagaatttgatgaacgaggcggtccggttttccgtctccgtcatcgtcaagggcatcggtttttttcatggcattatggtaatggccgcttaataccatcgccacattgcgattcggcttgacgactttttgatagatcgtctccccgatcgggcttcggtttccgcttacaagcaaatactcatgaaagcataatatggcggttcggtccggataccgctttagcacttgattgatccagtcaatctcttgatccgtaatgccccagcccatataaatcataataaaatcgttcccgcttgccgacagcagatcataatgcccgcggttatttttgtatgacccgccataatgcattttcttttcaaaacggcggctcccgaagaaatccccgaaggttcggtatgtgccgtctttatggccgacgtcatgatttccggcaagcactccgtacggaatccccgccttgtcgagtgtccgcatggagtgatcggcgtttttccactgtttcataaccatcgaatcatcgacaatatcaccggtatgaaagacatatttaatattgtgcttttccttattttctttgatccactccgtcattttgtcaaaaatgttcgggtgaccttgtgcgtaatactgtgtatccgacatccagacaaatgagtaattgcctttcgccggtatttgatcctgcacgatgacattcatttttgagttcttcaccgcatcggctgcggacacggcggcttttaacgtaaacggctttttatttttggcaaggacgctgtccgcctcctgccagcggcttgtccggtaattccaaatatacatggttaccttccggccgggcagagagcttcctttccagaccgcctcggccagatccgtttcgtcaatagacgggtcaacggacacttcaaaccggtgataagggaaacgctccatgttttccgtcgagacggtttttccgtcatttgccgagatgcggttcatttccggcagtgtaaacggcatttcattttctttcatgcctctcggcggttctgtcaatgaggcgtgctgatacactttcacgctgcccggattccgcgcggtataacggaagccccggtaaaatgataaattcatttcatccttcgtcggatcttttacccggacggacagcttcgctttatgggcgccggttttttggccggtaaactccggctgattcggctcctcccgtttgatgtggaaggtgcggacggatgttgtttcatttcccgcaaggtctgccgcagtgatggtaagggtgtgctttccgggcttaagatcggctgatgacgtatgatgcgggagcgtgatgctttctccgtccaaaaacgctttcacttcttctactttgctccatttatcacggatgtccgctttcagctcaaagttacctttcagtgtcgcgccttctttgattcccggaacaatcttcggccccgtattgtccaccagcacagactgactgagctgctcttcaccgtcgctcacaaaaatgtggtgatgcccttcagaaagcttcaccgtattccatggcagaagccgcgacgtaaacaaatgatccggcaggctgaatgagaaggtcatgcgctgattcgcccgcttgccgtcaccgataaacagctgctcagccggatcccgctccccgtttttgatcaccgttccgtctgaaagcaccaggcgggcatttttcacgataaaatcatcccgattctcccctgtgtcatacggagaaaccttggagcccgaacggatggagactttctgtgttttgccccctttttgcagcagacgttccggcagcagcaccgagtacgttctgtagcggtgtgccggatcgtcaaaaatgtgcagcacctcgttttccatcatgacggtgttttggaaataaagattcgttttccgggcatcgaaagcgaagtaaacttctttttccagcgcaggccgggtctcctgcagcttgccgtcaatccacagcttgatcttatcagcgctgacgtcggatgtcgctttgaggagataggtgccggatatcgtatcttcgggttcaatgttcatcctgagtccgtgtgatttgctcgtctgtttaatgtcaatcatcttgacgggcgtttttgcttcattttctccgtcaccggctgcgatgtaatactcaagctgatcctggccgagcagttccggggaataaagaatgtgacgatataacctgtcgttgcggtctttttcagccagaattcgtttaaatggttttttctcattggttctgtaataaaacgcggctgttttgacaaggtttttgtcccgtatgtcagcctttaattcgatgctttcagcgggccggaccggctttctgtctgtaaggtcttcaatgaccggtttttccttgtccggtttgatcacccttttctgctgcggaatctgcgcctgaaaaacgaatcccggtgacggcttatgttcgctcgtggaaatcttcagcaattctcccgttccgttcagcggatatttataaagcaaagaagtcagccggcggaacgcgtgttttcgatagtgcgctgaggcgatggtttttccggtatttgccgacagcaccaccgtcctcggccggtcgttggacattccgtccgtcccctcgatgacggcgagatgttttccctccttcagctgtgttccgtagtagcggttgaaatcatctatcgtcagttctgatgcggcgcgtctcagccaaaacacataagcgccgcctgacggaatgaccgtatcttctttcggcctccatatcatatctgactccggcccttccttcggatagcggtagcggatgtgataatccttaaaatggatgggtctgtccgtcgtgttatacacctcgataaattcataggcatccgcgccgtcttcatttttcgtatcaacggcaagttccgtaatcatcagctcgggaatatgattcaaatcggcttgatagccgtcaagcttcagccgctttttctccgattccgccctctgtctgccattggtgaaaacgaggtaatattccaattctccattccagatatcccgttttgaaacctgtgccgtaaacagctggattgaacctggagcgggctccatcggcaccatcttaaatcccagctcattactttgtttataaaaaagaaacgccgaaaatgcttgatagtcggcattctttacatgagcctgtatgaacaggtttcttttcatttccgcctttacttctatttggggaggattctccagaagcggtatgtaatgaggcggctgtccgaattcctgctgattcacggggattgccgattctttgcgcgccgcatccgcagaaggactcacacaaagcaaaccaatcagaaaaaagagcgtcatcacaagtttcatctcattacctccctatgcattatgttgcgtcaggaggcggccgcttatgtaccgcacataaaaaagctgccccccttggggacagcttctttttttatctttttctaagcggctccaatatgcctttttgaatcagcaagtggaaaacggacagcacgacggatgcccaaatggcggtgccgaacccgtcaatctgaaagctgtctcccatcaaggcagcggtcatcatcagcgtgatggcgttgatgacaaacagaaagaggccgagggttacaaccgtgacgggcaatgtcaatataatgatgatcggcttgatcagcacatttaacacagaaagaatcacacttgcgatgacagccgcgccgatactgctgatatgaacggaatcaaaatatcccgcaataacgattaataataaagcatttactaaaatgctgactgcccatttgatcatttatttcaaatctccttctaaaggtacaacaaaacaccagataatatatacaatcggcacgattccgctcgtgacaagcgctaatacaacggttatgatgcgcaaaagcgatgcatccatattgatgtactccgccaacccgccgacgacaccggcgattttacggtttttttctgaacggtaaagtcttttcatccaaatcacctctgagtatgcttgagcttaatggcccctgttaacgattctgagaaaatcgagagatgctgatcatggccttgatttgatgccagcatcagttctttttgaatggtatcattcttttcctttaaaatctccgcatcaatcagctcatggctgagagagccgagattgcttttcagctccgctttcaccgccgcgtcatcaggcagggcgatttccacgtttccggtagtcgttttcgtgtagatggagcggcaatgcggcgcagtcacggtaagcatgatattgccgttaaaactttggacgtcaatggattcactcgatccgcgcaaatcaatcaagccgttaatcgtttccgcttcaatcgtgccgcattggtgtccggccagcttgatttgtccgttagccgtttccgccgacgctttctcagccgtcaaatgagagaatgacagaacgccgtttgtcgttttcgctgagaattcttttacatgtaaatgttcccctctgatcggtccgttaaacagcttcactcttatcttatcgtactctttctgaggaacataaagcgtcacattggttttcatcgttttcttttctgtgcggacaaaaaacttattgcccttcacttcacattcaatgtgctgaagaaatgcggtgcgtgccgcctcctgactgtccgcccggtacactttcgcctggcattcggctctgatatcttcatccgcccaaggcacgatattgacgctgccgtttgcgatctgcatatcaatggccgagaactcactgtctttaaattgaaaaatatgctggacttcgtgtgcatggccgaaattcagatcgagatccgcttccttcacttttttgacggccgaatcaatccaatcgaacagcttagccccgatcgagggtttttggcttccttttgtcccgctttcgaaatcttccgcgggttcctggacctctgttgataatgcggtgatctgttcttctttttctttatattcgtgatcaagtttttcaatgagcgtcagagcttcctgcgccgtcagcctgccttcttccacaagctttaaaatccgttctttttcctgcttcatacaaaactcctcccccgacttttcttacacctggcgtaataccttaattccctgcacgatattccaaatgaccattgcgatgaggatcagaaaataaacagcagctcctgttatcataacaaaaaacggaaccatactctccccctgagccgtaatcactccgccgacaacgccggcgatcacaatcaacaatcccgcaaacggaatgatgtgagaaatcagggcgcgcatggcatgccgcttcgtctctttttcatcaacgacaaagtaagccacaatcggaagaatgagcggcgcgagaaacacgctgaaataacagattgatgcgataatcgcttggtttcgattcaataaaaacactccctgtgctgtcatgtaaaaaaccattccttatacatacgtatgacgaatgggcgggtttcattttcatgctaaggacatgcttcgttatacataattttggatttccgggatctcactatagaatcttttccccgaacccattacaatatgtaacaaagcctgaccgtatgcaaggaggacatacaatggagaaagatcccggaaacgaccaagtgacggaagaaagtctgcgaaaattaattcgcgaacagaaaagaatgaacagtgaaatgctggctgaattggaacagatcaaggcagccccacttcccatttcccatgatattcaatatataaaagtgctgctggacagcagcagcacccatattctgcaggacttgatgcatttaagcaaacagcttccccgacagaaaaaaagcctgtaacaaaacagcccaaaaccgatacgttttgggctgtttttattgatctattacgtggctgccgtttctttttcggccagcaatgttttcatccgttttttatcacgttccattaccggtttcagatagcggcccgtatatgattccttcacttcaacaacttcttcaggtgtcccggaggctacgatcgtgccgccgcccgcgccgccttcaggtcccagatctacgatgtagtccgccgtttttatgatatcgagattgtgttcaatgaccaaaacggtatccccgttatcaacgagtctttgaagcacgaccaaaagccgtgcgatatcatcgacgtggaggcctgtcgtcggttcgtccaaaatatacagcgtccgtccggtggagcgcttatgcagttcggaagcaagcttcacgcgctgcgcttctccgcctgacagcgtcgtcgccggctggccgagcgtcacatacccgagtccgacatcggcaagcgtttgaagcttgcgtttgattttcgggatattttcaaagaaagacagagcatcttccaccgtcatatccagaacgtcagaaatgctttttcctttgtatgtgacctcaagcgtctcccggttgtaacgtttgccgtggcacacttcgcacgggacgtacacgtcgggaagaaagtgcatctcaattttgatgatgccgtcgccgcggcaggcttcacagcgcccgccttttacattaaagctgaatcggccttttttgtagccgcgcaccttcgcttcatttgtctgcgcgaacacatcgcggatatcatcaaatacgcctgtgtaagttgccggatttgatctcggtgtccggccgatcggcgcctgatcgatgtcgatcaccttatcaagatgatcgaggcctttgatctctttatggcttcccggtttcgctttggctttatgaagtttttgcgcaagcgccttatgcagaatttcgttcacaagcgtgctttttccggaaccggacacacctgtcaccgccgtaaaagtgccgagcgggaatttggcgttcgcttttttcaggttgttttctgaagcgcctttaatttcaatgaatcggccgtcaggctttcttctctccggaggcatcgggatgaattgagcccctgataaataacgtccggtcagagagtccgcatcattcatcacctcttcaggcgtgcccgcggatatgacacggccgccgtgaatgccggcgccggggccgatgtctatcaaataatcggcagccatcatcgtatcttcatcatgctcaacgacgatcagtgtattcccgagatctctcatgtttttcagcgcgctgatcagacggtcattgtcacgctggtgaaggccgatggacggctcatccaaaatgtacaggacgcctgacaaacgggagccgatctgcgtcgcaagcctgatacgctgggcttctccgcctgacagcgtccctgccgcccggctaagcgtcagataatctagaccgactttatctaagaaactgagccgctccacaatttctcttaaaattaaatcggcaatctgcatatctttctcagacagcgtcaggtttttgaaaaattccagcgcatcgccgacggaaagctcggtaatggttccgatgtggcgtccgttgaccaaaacggccagcgcttctttcttcagccggtagcctttgcacgtcgggcacggcttctgtgacatgtactgctccatctgttcacggatataatcggagcttgtctctttataccgtctctcaatattgcgcagcacaccttcaaactcaatttcattttcccgcacttgcccgaaatcattctcgtatttaaagtagatccgttcattgccgctgccataaagcactttatcaagctgatgattcggcaggtctttgaccggagtctccatatcaatgccgtaatgagtgcagaccgcctgaagcagctgcggataatattgtgaactgatcggcgtccacggcgcgatggcgtgttcctttaatgacagttcaggatttggaatgacgagttcagggtccacttccagcttcaagccaagaccgtcgcaagtcggacaggcgccgaacgggctgttaaacgaaaacagccggggctcaagctcaccgattgaaaaaccgcacatcggacaggcgtgatgctcgctgaacatcagctcttcctggccgatgacatcaatcatgactcggccttctcctaagcggagcgcggtttccagtgagtcggaaagccgggcggcaacaccttccttgacgacaatccggtcaatgactacttcaatggaatgctttttatttttttcaagttcgatctcgtcggaaagctcggccatttctccgtcaatccggactcttacgtaaccttgctttctgatttggtcaagcactttgacatgggcgccttttctgccggagataatcggcgcaagcacttgaagcttcgtccgctccggatattcaagaatccggtcaaccatctgttcaatcgtttgagacgtaatttcgatcccgtgctccgggcagtgcggcttcccgactctcgcgtataacagccgcagataatcataaatctccgttaccgttccgacggttgaccgcggattgcggcttgtcgttttctggtcaatgctgatggccggagaaagcccttcaatcgcatcaacgtccggcttatccatctgccctaaaaattggcgcgcataggcggaaagcgattcaacataccgcctctgtccttccgcgtaaatggtgtcaaaagcaagggatgattttcccgatccggacagacccgtcacgacgacgagctgatcccgcggaatcgttacatcaatgttttttaaattatgcgcccttgcccctttcacctcaatccggtcaattgccatgtgttcatcatccttccgcttttagctctaacagtaaatcacgaagctctgccgcccgttcgaaatcaagcgctctggccgcttctttcatttcgtgctccatttgctcaacgactttctggcgttctttcttcgtcatcttcgccagcttaggagcggcttttgttttatattcttctttatcctcagcggcctgcgtcgcgcggatcacatcgcggatttccttattgatcgtttgcggcgtaatgccgtggatttcgttaaagcgctcctgctgttcccgccggcgcttcgtttcattaatcgcaatttccatcgaatgcgtgattttatcggcatacatgatgacgcgtccctctgcgttccgggccgcccgtccgatcgtctgaatcagcgaccgctcggaacgaaggaagccttctttatccgcatccagaatggcgacaagtgacacttccggaatatcaagcccttccctcagcaggttgatgccgattaacacatcatgtttcccgaggcggaggtcacggatgatttcaatccgttcaagcgtcttaatctctgaatgaagataattgaccttgataccgatttccttcagataatcggtcaggtcctctgacattttttttgttaaagtcgtcacgagcacgcgttcattacgttcaatcctcgcctgaatctcaccgatcagatcatcaatctgcccttcgatcggacggacatcaatgagaggatcgagaagtcccgtcggcctgatgatctgctcgatcatttccggcgtatgctcaatttcatacggtcccggggtagcagagacgtacacgatattgtgcatgtgcttttcaaattcctcgaatcgaagcggacggttgtcaagcgctgacggcaggcggaacccgtgatcgacaagcacctgttttcttgcctggtcaccgttgaacatgccgcgcacctgcggaatcgtcacgtgtgattcatcaacgacaatcataaaatcatccggaaaataatcaagcagcgtatacggcgtggagcccggaggacggagcgtcaagtgtcttgaatagttctcgatccccgagcagaaacccatttcccgcatcatttcaagatcatatctcgtacgctgctcaaggcgctgggcttccagaagcttgccgttttcgcgcatgacttttaagcgctcctcaagctcctgttcaatattcagaatcgctttttccatcttttccgcccgtgtgacgaagtgggaagccgggaaaatcgcgacatgatcgcggtcgccgagaatttctccggtcaaagcgtcaacctctctgatccgctcaatttcatcaccgaaaaattccactctgatacaatgttcgtcacgggaagccgggaagatttccacaacgtctccgcgcacgcggaacgtcccccgctgaaagtcgatatcattgcgggcatactggatatccacaagctttctcagcagctcatttcgctcaatctccatttccggtctgagcgacacgaccatttcccggtattcttcaggcgaaccgagaccgtatatgcatgatacactcgcgataataatgacatctctccgttcaaacagagaggatgtggcggagtgtctcagtttatcaatttcatcgttaatgcttgcgtctttctctataaatgtatccgtctgaggcacatacgcctccggctgatagtaatcgtagtagctgacaaagtattcgacagcgttgttcggaaaaaactccttaaactcgctgtacagctgtccggcaagggttttgttatgggcaatgaccagtgtcggcttgttgacttctttaatcaaattggacacggtaaaggttttgcccgtccctgtcgcgcccaggagagtctggtgttttctgccttcctgtatgcctttgacaagcttctcaatcgcttgcggctgatctccctggggctgatatttcgagactaactcaaaacgatctttcacaaaaaagcctccgtttctttacgaaatcttcctattgatatagtaacacaatgacgggcaaaatcactaaaaatacgaactaaagttcgatggtttatttttaccaagtcaatttttgtataaaaaacctgcttttatggcgtaaaagcaggcattctatttcatattcaccatgtcaggcattgtctttctttttgtctgcttcttttttagccatgtacagcccgccggctaccagagagacgacatccaatccaacgataaaatacgtttcggtgtagccttttaaataggatgcgaaaagcagcgcggctgtgagagcgatcgccacatagtggttaaaagtgaccctcgtaaaaaggacgaccagcataaaagggaaacataatgcaaaaacggcttttgtaatcacaaaaaccctcctcgggaattcttcatctcatctgattatagtaaaaaatgaagaatcggacaatcgttcccctgctatcacaataccctttttcaccattcttcaatcatctgtcagaaaaaatgtaaaagtaaatccattgaaccgttaacaaaatgaatcaaattgcctttcttcagccgaaaggcggagaacgattaggtctttgtgtctttgacagtttcttcctccctctttacaatgtaatgatagtgttcactatcattttcttggatgaagaaaaaagggggcatcactcatgtattcagtacgatttcaaaaagcggaagaatcaagccgctcagcgggagcaaaaggaatgaacctgattaaactgacgaaaaacggcctgcccgttcccgacggttttgtcattcagacgaacgctctgacacgttttatagaagacaaccggcttcaagcagcagacgcacatatggagcgcgccattatgaacggcacgttttcaaaagagctccgagatgagctggccgcgtcattttatgaattgagagaatcatacgcctctgtcgccgtacgttcctcatccgcgtccgaagatcttgaaggcgcttctttcgcgggccagtacgaaacctatttaaatatcaaaacagaagaagagtttctaggaaaagtgaaagaatgctgggcttccttcttctcggcgcgggtcagcggctataaagagaaaatgaacaacgataccgcagagccgttaatgggtgttgtcgtgcaagggctgatcaattctgaggtttcgggggtcattttcagccgcaacccggtcacacacgatgacggagaactgatgatcagcgcgagctacggcctcggagaagcaatcgtttccggcagcgtgacgcccgacacatttatcgtcaataaaggcacatttcagattgacaaagaaatcggcttaaaagaaatatatatcgtttctcaagaggaaggcgtgacggaaaaagagacgtccgctgacatgagaaaccgcttctgccttgatgatgagaatatcaaagagcttgccatgctgacgatcaagacagaagaactgtacggttatcccgtggatcttgaattcggatttgccgaaaataagctgtatctgcttcaggccagaccgattacaacgatcgtgcaggatcagaaagcggcggacgaagaacgggaatttatcatgacgccccgggatcagaaagatttttggcttaatatggagtccaatatagaaggccccgtgagcccgttattcgcctcgctcattgtgccggctttagaatacggcctcaaagagagcacaaagacattcccagtaatgggcatcgaaatcgagcgtgtcaagcttcatcaaggccgtgttttttccagacagcataagacggacgacaagctgcccgcagaacagttagaagcgctatttcccatcttggctgaccgcatgtacgatattattcaggaaacctttctgcctttttatcaaaagctggacgaactggcgcatacaaaccatacacgggagactgccctcgatgcgttccgaaacctgcaagacttctatttgaaaggatacgaagaacatttcaacattgtctttccgcaggttgcgttaaacatgatgctggaatcgatgtacggacagattgagaaagaaaacacctccctcttgtacgaaatgctggcgggtgtcatgaataaatcattagaaacagacagacagctttggctgctttccggacaagtaaaagacagtcctgagctgcggcgtgtttttacggtttctcctgccgatgagcttcatcagacgcttctgcaatcaaatgaaggaaagcgctttcttgaacaagtcggtgaatttttacaggaatacggctggagatccgtgaaaagccacgacctgctcgaagaaacatgggcggaaaatccttatttcgctttggctaacattcagaactatgtccggaacggctacgattttgacagtgagtttcataaaacgatagaaaaacgaaaacagctttacgccgccttcatggagaaaatcgaagatgacggcttccgggagaagtttgaccgctattatcagtggacgctgtcttcctccgtcatcaaagatgatcaccatttttatattgatgcgatgctggacgccaaagcgcgcctttgcctcttgaaaatcggcgagctgcttgaaaaacaaggcgtgatcgatgaccgggaggatatgtggtacttatacagcgatgaagtcgagaaagcgctggcgtcgcctgttccgatgcaggaaaaagcggctgaacgtaaacagctgttccagcaatatcagcttcttgaagcgcccgcttatctcggcactccgactccagaacagctgcaagcggctgagcagattaccggttccatcacagaagatgaaaaaaacactgaacatcatatatacggacttgcggcttcaagcggaatcgcaagcggccctgtgaaagtcattcgtgacgcaagtgaattttcccttttttcatcaggagatgtgcttgtctgcaaaatgacgacaccgctttggaccagtctgtttcaagacgcaaaagccgtcattacggacacgggcggcatcctgtcacacgcggccatcatagctagagaatacgggcttcccgccgttctcggcactcgcgccgcgactgacaggctcaacgacggagatatcgtctcggtagacggcacaaacggcaagattacgattgtcaaacgcgcttcatgctaggtttccctctttattgacgggcagggcgggtgtatacttgtcctgccagtattttcgcgaggtgaaacatgttgagaacgacgaacaagagaattcttgacgctgcgatgaatcttattatccaaaaaggataccgcgccgcgacaacaaaggaaatcgcagaaaaagcgaatgtaagcgaagcaacgattttccgtaattttaaaaacaaacaaggactaatgaaagcaatgattgagcagcaggcgcccgcaccggaaaacatgatcgccaaggcggaaggcgacctgtatgaagatcttcttcatttcgccacggcccttttgcagcaattggaacaaaaaaaagaggtgttccgtatttgcctgcgcgaaccggaactattcgaagacgtcctgcaggatatcatcgtatatccgcaatctgtgaaaaaggatttaatcgtttactttaaggagctgaccaagaaaaacatcataagccccggcagtgaagaagcaaatgcagacgtctttatgacaatggtcttcggttattttatgcaccgtctgcagctggggaaaagggtcattactctttctgaggaaacgatgctgaaacacagcactgagatttttatcaaaggaatcgtcagccggtaatttttccggctcctaggaggatgaaggatgggttcaaagaaagaatgggcgctgatcgtttcgcttttgctgggagccatactcgttcccatcaattctacgatgatcgcagtcgccctttcatccatttcccgctcattcagcgaatcaattgccagcatcacatgggtagtgacggtgtatttaatcgtgatggccgtgacacagcccattgccggcaagctcggtgatatgtacgggaacaaaaaaatgtatttatggggcgtcggcctttttcttatcgcatcattggggtgcgccctctcgccaagtcttttcttattgattttcttccgggcgcttcaggccgccggcggcgctttgcttacgccaaacagcatcgccatcatccgccatgtcgtgtctgaaaaacggcttccgaaagtattcggttttttcggcctcggtgccggactgggcgcggctctcggcccgtttatcggctctcttctaatcgagagcttcagctggcattctatcttttgggtcaacattccgtttcttgcgatcgcactcgggacggcattgatgatgtttcctaaatataaagaagaaacttctgacgcgccgcttgatatcatcggatctgttttgcttgccggaagcattgtatctattattcttctgacgaaaaacgaaagctctatgggctattgggtatacgcgctgctcattcttgtatttgttccgttatttttcaggcgggagctgcgcacgaaacatccgattattgattttgacctgtttaaaagctcgacatttacaagcgccaatttgtcggttctgttaagcaatctaatgatgtacgccgtgctattgattatgccgctctttatgaccggccacttcagcatgaatacgtcgcacagcggcatggcgctgtccgtcttttcgatttttatgtccgccagcaactggggcggggctcagctgcatcataaatggggcgcgcgaagaatgatttttctgtccttcatgctgatggccggagccaatctcttatttctgcttttggtttattcccattccgtcccgttccttatggcatcgcttattgtcggcggcatcgcatccggtgcggggctgacgagcatgcaggtgtcttctcttgcgacggtagaaccgggcatgtcaggcatcgcgtccgggattttttccaccttccgttatttcggaagcattatttcttcagcactgatcgggttaatctccggatttcatattctgtttatcatattgatcggcgtttctgtgatcggcatgttcgtatcacttggaattaagtccggggaaaccgttcatacgaaaaaaagccattcggcgtaaacgaaaaaggttccgtaagcatctgctttccggaaccttttctagtttttcttcttcattttctctttcaaagtgtcaccgcactcccccgatgcatagagtatcgcaacgccgtttgctctatgagaatcttttcgttaaaagagaaaaggggaatgtaaatggctaagagttcagaccaagttaggccgctggcgccgtctcttacagtcagcgccgttcaaaacagcacagaaggaacagcgtcagatctcgttcttacctattcgccgaattccgtgctttcgttaggcggagtcgtattccggctgcctgaagggtttaccgcaacgacgaatgacaccatcaacaacaataatttaacttcttcacaaatatcagaaggcggcagaaaagtcacgttgccattgacgctcgatcttctcggacttgcccagttcacgcttgtgctgacaaacaaaacactcccggcggcaggcacgtataccttttccgcagaaaatacggtgctgatcatcggttctctgctgccggcctccgctgatctcactgtgaatccggcagcttttgcttatgtgaccaactatttgagcaaccatgtcggcgctatcaacagaatcaccggcacggtttccagtgtcattccggttgaggctgcgccgcttggcatcacaataagcccgacggcagatttttgtacgtgtgtaattcgggagaaaacagcgtatccgttatctcaaccgagacaagcagcgaggtcaagagaattccagcaggcgcgtctccttataaaatcgcagcttcgccaaacggaaattttatatacgtcaccaaccagcaaagcagcaatgtttatgtgatcaacacacaaaccaataccgtcatctcagtcattcccgtcggccttctgccgacaggcatcgccgtatcgccgaacggacagcttgtatatgtgctgaataccaataccaacaccgtttccatcatccacacggcagacaatacagtgacggcaaccattattctgccgtacaattctccttccgatctcgtcttttcgccggacggaagcaaggcttatattacaaaccttaacagcaacaatctctccattattgataccggcacaaacaccatcattgataccgtcaatacggagctgaatccgctcggtgtcacgataacgcctgacggagcgaaagtgtatattttaaattcaagcagcggcaccgtatctgtgctcaatacagctgcaaacacgatcacagcgattattcctgtcggtcagtatccgtacggcgccaaaccggatacagacggaacacgtattttcgtcacaaactttttcagcaatcggatttccgtcattgacacggcgtccgataccgtcgtcggcaccattacctcagaattgtatccggctgacattgtaatccggccgtaaaaaaaagcccggccgccgtgtttttaacggcaccgggctttttttataatgctgtcatttcttcttgctcatgttcatcctgcacgaataaaatacctaattcatgatgttcgccttcataggacgcacgctgatcaaaccggatctcaccgttcaggccgatgatctccatttttacaaatgcgcggtttttttgaagtgcttcataaaaatccgatacatgcttcacgggtatgccgtttactttcgtaataatctcaccgatcttcagattaagatcttccgcgggcgtattcggaatgataccgagcaccattaagccttgatcccgcttagagaaataaaacggagccgcattatcgttcaaccgctgtctcaatgataaaaacaggcggccgagcaccgcgatacaaacggcagcaccggcaagcggagtccaccaaagggccgctgccccgaatacggtaacgatcattccgagatacataacacgtttcgccgttatccttatgctgacctccggaagggatccctgtacacgctgtccaaagcccgcgatataaggaatccagatcaaatggaaagagccgcccggcacggtaaagacaggccaccaagaaaggtgtgtttcaagcccgctgcccggcaccaataagaaaagcggaagcagccatgcgcgattcgccaattgacggccgatgggcagacctctgctgctgacgacaagcgccggagatgttttttcaagcgctgaacggtaagcagcagccccctccgtgatgatcaaaaggcccatgaacacggccgccgacgcccaattcacgccgaatgcctgcggaaaccgatccgcaaacggcaatgtgtgggtatattgaaggacaaacacaatgaacataccggcgctgacaatataagctgatgacaaccaattcatacggaacgtcagcgaagccaaagccgtcacagccgcaatgatgccgagaagaccgaatggaatcgaaattcccagcccaaaaaataatatggagagaagaatccccggtataagcccttttatgtatgtaaagataagctcgtcatacatatctgcgatttttgtatgaaacgtatggcgttcacgtttaatccgcaaatatccgcatgcgagacttatgatgataaaaaaccaaaacatcgggtgcaaaaaaaacagaccgatacttttcagaagttcaattccccattgaacagacactgctttcaccgcctcaagccaaacattttaattctattctaccaaataatcattggcttgaatatctcaaacgtctatctctcttccgtcatccacagtgttacatttgagagagagaaatcttttagataatggtcgacctccacctcgatcacgccgctgatcagaagcatggaccgcttaatatccgtcagattgattcctaaacgtttatggtttttcattaagtaagtgaaataatgctttgcacactcttcattgatttcgtgaacactttcaacatttgtgtaattgaccaggtatctgctgaacagcatgagaagacttagtgcttttgttgatgaaaatgtgacgtcttttgttctgtcttttagttgttccactaattcataatattttttttcacgcacaatacttgccctcttcaattgtgaacccccatttttttatccagataagcacgggtgattacagctgccgtgctgaagcgccgcaaacacttctgctttcaatactgaaatgcagctgccagactaaaactgttctctattagaaccttcttttattgtaagaactaaaactgactgaggcaactttcaaaagtttcattttgaatacatattaactcggcataaagtctctcttccctataaatatcgggtaatgtttgtcctttataaatgtttaaatgtgaaaatttttttaatatcttgtcaaaaacgtcataattatatatctttcgattcatttttgacgaaggacaaaagaaacaggaggcgaaaaaaacgcctccttttcatttattttacaaataatgattttaacgccatttgcagctgtaaatcatttttttcgtcagctttcttctcgttcatcagctgattcattttttccgctgtttttttgtcaatgacagctgttttatcaagcttgttccggtcttgaaacgccagaacggcttttttcattgttttgctgaaatagccgtccgccctgcccgggtcgaagcccaagcctttcagcaggatttgggcgtgtttgacatccgcactgttcatatcaggctgaagcggctgtttcagctgaagcggccccgctgcaaaataatccggctggctcacggcgattgtcggggtaatgccttttttgtgaatccaattgcctttcggtgtgagccatttgtacagcgtcaatttaatgttgctgccgtctcccataggtacggcctgctgaaccgttcctttaccgaaggaggtatcaccgacaacgtcataatgtcccgcctctttcaatgcgcccgcaagaatttctgaagcggaggcgcttcctttatctgtgatgacattgataggatacggctttttatgttttaaggttgagaaatattgttttttatccccgttacgttccgcgatttgaatatacggcatgtcttttgtgacgaaatgctttaaaatttgttcgacgctttgaaggtagccgccgggatttccccttacgtcaagaacgagcccgtcaatcccctgtttctcaagctttttcagcgccgctgcgaagtcctgagcggtatgctcggaaaatgtggatatgccgatatagccgacatgatgcccgcctgattctttgcgggaagcaaatacggtttccagcggaatttccgctcttttaatccggaatgacagctgtttttcagagcccggacgctgtattttaatagaaaccttcgatccttttttccccctgattttcagcacggcttcgtttaaatctttcccgttcattgactcgccgtttatactgatgatttcatcattcggcttgaggcctgctttttcagccggagattgcttaaacggtgatacgataatgattttattatcttccataccgacttcagcgccgattccttcaaaagaagagtcaagagaatcggaaaactgcttggcggtctgcttgtccatataaacggaataagggtcgtttaatgtagacagcatcccctgaatcgctccttcaagaagcttttctttatctacattttccacgtattcgttcgagatcagctcatatgctttttcgattttttccattgcctggcttctttctgcttctgatgaattcggctgtgccgccccggcaatatgggcgccgccgcacatgatgctgacggccgctatcgctgcgattattttctgtttcatcgtttacctcctcttagtccttttacgaaaacctggagatagtatgtgtaaaccggaaagaattcatgtaatggcaacaaaaaaatgaatacgcaattgtttcatataaatgggtaacgtataatattctgtatataattcattaaatatacaggagaatacgatatgaaaataaaattatcaattttatccgcagcggtgctggccgcaggcataaccgcctttgtctggcaaaaaacagaggccaatgaaaaaacgcagacggatgccctgtatgtttctcccgcaggcagcgatcaaaatgatggaacgaaagaaaagcctttccgcacattgaagcatgcggcggaaaaggctgaggccggaacaaccgtattgattcgggaaggaacgtacgatgaaacatttgaggtcaagcacagcggcacgtctgagaagccgattacatttcagaactatcagaatgagcatgtcgccatcagcggcaaatctgcgtcagacggcgattctgaaacaccattaattcaaatccgcaataaacagtacattaccattcacggcattacgcttgaaaatctctccgtttcatcagaagatgcgacagccatgggaatctacgtcaccggatcaagcagccatattaccattgacggcaaccacatccaaaacattaaaacaacggctgatgacggaaatgcacacggcatcgcgttttacggcacaggcgcgatgaaggatgtcagcatcacaaataatacggttgaaaaactgacgctgggcgcaagcgaggcggtagttctgaacggaaatattgacggatttaacatcgccggcaataccatccgggacaataacaatatcgggattgacgtgatcggctacgaaggaacgtccaaagaaaatgattatgcgcgaaacggcgtcattgaaaacaatacagtgagccataattcctcttacggaaatcccgcctacggcaatgaatactcagcgggcggtatttacgttgacggcgcagaacatgtggacattaggaaaaacaccgtttacaacaatgacctcggcattgaagccacttctgagcataaagggaaatacgcacaagatatccggattacggataacaaggtgtataacaatgcttacacgggtatttcaatcgggggctatgacacgaagcgcggcggcacaattaattccgtgatcgctcacaacatcatgtaccgaaatgacacgaagaaccttgacggcggccagctgctgctgcagtacgacacaaaagggaacaccatcgaaaaaaacatcatgacggcaagccgttcccggatttttatcgcaaatgattttacgaaaaacgaaagcaataccgttaaccataacgtctatcacaaagaaacaggaaaagacggcatttggaattggaaaaacaaagaataccgctcattcacagcttaccaaaaaggaacggcaaacgattcaaattcgatttatgcggacccgatgtaccgtgacgaatcgtcttatgactttacattaaagcccggatcaccggccctgcccgtcattcagtaacggaaccatcaaaaaaagccagtctttatcagactggcctttttttatttatacacgaaggaattttcggatggaagtcaggcttccccatactccgataaccgcgccgatcagaatgagcacaagtgatacttggaacacaaacggactgtacggcagaagtgaaacaaatgaaccctgaactttcggagccacccaagcgaccatcgactggtacgtactgagcacgagtgcgatcggtatgactgaaccgaataccccgagcagcagaccttcaaggaaaaacggccagcggataaaccagtttgtcgcaccgacaagcttcatgatttcaatctcttttcttcttgcgaaaatcgtgattttaatcgtatttgaaattaagaacatcgccgtgaacagaaggccgatgattaacgcaatcccgatgttgcgtgacacgccgacgatcttaaacagacggctgacttcttcttttccgtatgtcactttatacacatgatcaagcttctcaatttttttcgcgactttcggcgtatcatgcggatctgtcgttttgacgataaacgcgttgttcagcgggttttcctgatcttgcattttcatggcctttccgctgtcgccgaagcttttgaccaattgatcaagctctttatctttagatgaaaactctacgctttggattcccgagatgtccttaatctcattctgcagcgtatcctgcgttttcttattcgacgtcaaatcaattaatactttaatctccacttctttttcagcatttttagccatgttgtttaagttcagcataatgactaaaaacacgccgaccaatatcaatgtaacggtaacggcactgatggatgcaaatgtcatccatgtgtttcttccgagagatttaaaactctcacgcaaatggcgcccgagaattttaatcataagaaccatactcccctcttgactcatcacgcacaataattccgtcttcgatcgcgatgacccgtttcttcatggtgtttactatttctttattgtgtgtcgccatcacgacagtcgttccgcggttgttaatctcttccagcgtcttcatgacttcccatgatgttaccggatcaaggttgcccgtcggttcgtcagctataacgacgtcaggattgttgacgatggatcttgcgatggaaacacgctgctgttctcctccggaaagctggtcgggaaactgccgcgctttatgcttcagctgcaccagatcgagcacttcaagcacgcgttttttaatgactgactgctgctctccgataacctcaagcgcaaacgcaacgttttcaaataccgtcaatttcggaaggagtttgaaatcttggaaaacaacacctattttacgccgcacgaaaggaatctctttttcttttacagccgcgagatctttatgattaatcaatatttgcccttttgtcggtttttcttctctgtaaatcattttgataaaagtagatttaccggctccgctcggtcctacgacatatacaaattctccgggatgaatcatgactgacagcccgttaatcgcttttacaccgttcggataggatttatatacttctttcatctctatcatgaaatcacctaatcttttatttatgtcttgcagccatagagttcgcaaaaatactgcggtttatggccgatttaccaggaaacagatgaaaaatctgaaagttccttttcctcagtacacttcattatacgtcaaatttagacatattactattacagtttcttttcattcccaggccgtgaaaaaaccttgccccttataacaggcaaggtttttctgttattttttctgtgacagccatttggcgatctttgtggcgtcctcatcacttacaagatggctcggcatattgccgcggccgtttttaatgatgctttcaattttagcttcatcatatttcccgccgacttcctgcagattgggacctccgccgccttctaagtcttttccgtggcagccgatacagctttgctgataaagctcttcgcctgctgacgcggaagcttttgatccgcctgagctgtcagagctttctttttttgattcattggatccgccgcatgccgccagcaggacggacatggtcagaaccagcgccagcagcgcccattttgatttcatatgtaagatgcaccccttcgctattataactccgtttatgcgcgtttgaaaccctcgccgagcacctcgcttgcgtctgcgacaatgacaaaagctgactcatcaatttgtttgacgatttgtttcagttttgtgaattcggtctggccgacgacacacattaagatcggccggtcatgttccgtatacccgccgactgcggaaatcttcgtcacacccctgtcgatttgcgtaaacacagccgacctgacggcttcttcatgctgcgtaatgattaaagccattttggaacggttgaacccgacctgtacgacatcaatcgttttgcttgaaataaataccccgagcatcgcatacagtccctgttccactccgaaaacgagcatcgcgctcagcacaattaatccgtccatgatggcaagacacgtccctaacgaaagccccgtgtatttgtgaatgatctgcgccgccagagccgttcctcccgtggagcctttgccgagataaacgatgccgatccccgtaccgatccccacgcctccgaaaatcgccgccagcaattcatgggtcgtcgcggcagggagatctcttgttaaaaagacggcaagcggcagaacgatggaaccgacaagcgtcttcattccgaatttcccgccgagaatgatcactccagcgataaacaaaggaatgttaataatccactgcacgtaagccggttcaaaaccaaatgtttctaaaatggtgctgattccgcttactcctcccgctgctatacggttcggcagcaaaaatacgttaaacacgacccctgtaatcgccgcgccgatcatgatatatatgtaatctttgatcagacggagcggtttattgtgattcacatccatgcaaaatcctccgttctccgattttctctcgatagcattttaagtcttcccggcttagaagtaaataacagccaaataccgtattaatttgctaaagcgctattgtgaaaaacggaaaaagagaagcgataaaaaaaacacaccatgccattggcaggtgtgttcccggattatgacagtttggagcgtaaataggcatcaatgaagatatcaatatctccgtccatgaccgcctgcacgttccccatttccgtatttgtccggtgatctttcaccatggagtacggatggaatacgtacgagcggatttggctgccccagccaatttctttctgttcgccgcggatttcgtcaagctccgcctgctgttcttcaattctgcgctgatacagcttcgctttgagcattttcatcgctctgtcgcggtttttgatttgtgaacgttccgtctggcatgtgacgactacatttgtcggcaggtgggtgatccgaacggctgaatcagtcgtattgacatgctgtccgccggcgccgcttgcccggtacgtatcaactttaatgtcttcggtccggatttcgatatcgatttcttcattgaattcaggcatgacttcacatgacacgaatgacgtgtgacggcggcctgatgaatcaaatggagaaatccgcacgagacggtgtacgcctttttccgcttttaaatagccgtatgcattgtggcctttaataagcagtgtgaccgacttaattccggcttcatccccaggcagataatcaagtgtttcaactttgcatccgcgtctttccgcccagcgggtatacattctgagcagcatggaaccccagtcttgggattccgtaccgccggctcccgggtgaagctctaaaatcgcgttatttttgtcatatggttcactgagcagcagctgaagctcaaattcattcaattccttcgttaatgacttcagctctttctcaagctcttgctgaagttcctgatcaggttcttcttttaaaagctcatatgtcatttgcagctcttcgtgagactcgctcagctgatgataggagttcacgtagtctttcagaccgttcgcttcgttgatgacggtttgggccttctgctggtcattccagaattccggttccgccatctgttcatctaattctgcaatgcgggcttcctttgattcgaggtcaaagagaccccctgaagtccgctaaacgagaagccatattttcgagctctgccctgatttctgataattccattccattcacctcattaaaagatccggggcgtcataagacgcagacccggtcatgttcgcttcctgcagtcgtgactattctgtccggccgcagcaatttttatatttttttccgcttccgcaatggcaaggcgcgttgcgtccgatatccacgactttgcgcaccggcgcttttttcgcttgtttggcttcatcgccgtcctgctgctgatgagccgtcgtttggccctgaacaacttcttcgcgttccagattgctttcaatctcggccttcatgacgaattttgcgacctcgtcctcaatggactcaatcatgtgctcaaacattgcgaaaccttccatttggtattcacgcagcggatttgtctgcgcataagcgcgaaggtgaatcccttgacgcagctgatccatcgcatcaatatgatccatccattttgaatcgacggcacgcaatacgattactttttcaaattcacgcatctgctctgcgccgaaattctcttctttttcattatatttcgtcatgatgcggtccatgatcatctcatgcatttcatcaggttcttttccgaagatatcgctcttttcaagcgcgccttcatcaagatacgttgtattgaccagctccacgagtccgtcaagattccattcttccggaagctcctcgctcggtgtataagcggcaatcgcacgctccagagaagacttgatcatgccttccacaatgtcacgcaggttttcagaatcaatgacttcaaaacgctgcttgtaaatgacttcgcgctgctgacggagcacgtcgtcatattgaagaagctgtttacgtgaatcgaagttgtttccttcaacgcgtttttgagacgattccacggcgcgtgacaccattttgctctggatcggcgtggtgtcatccataccaaaccggtcaagcatcgccatcgtccgttcagctccgaaacggcgcatcaattcatcttccattgaaagataaaattgtgtgatgcccgggtctccctgacgtcctgaacgtccgcggagctggttgtcaatccggcgggattcgtggcgttccgtaccgacgactgcaaggccgccaagctcttttacgccttcgccgagtttaatgtcggttccgcgtcctgccatgttggtcgcaatcgtgacagcgcctttttgtcccgcttcttcaatgatctgagcttcacgctcatggtttttcgcgttcagcacctgatgcggaattcctttgtttttcagaagttttgaaatcaattcagacgtttcaacggcaaccgtaccgacaagaaccggctgtccggtcatgtagcgctgggcgacatcctccgccaccgccttgaatttcccttccattgagcggtagatcaagtccggacggtcgtcacggataaccggctggttggtcgggatggacacaacctgcatgttataaatattgcggaattcttcctcttccgtttttgcggtaccggtcataccggccagcttttcgtacatacggaaatagttttggaacgtaatcgtagccaacgtcatgctttcattttgaatctccaagccttcttttgcttcaatcgcctggtgaaggccttcgctgtagcggcgtcctttcatcagacggccggtgaaggaatcaacgatgacgacctggccgtcctcaacaacataatccacgtctttctgcatcgctgcatgggcttttaaagcctggttgatatggtggtttaaggcgacgtttttgacatcgaacaggttgtcgatgccgaacgctttttcagccttcgtcattccttcttccgtcagctgaacgcccttcgttttgacgtcatacgtataatcctgatccttcttgagtgtgcggacaaacgcatttgcctgcacgtacagttttgtggacttctgagcttgtccggaaataatcaatggcgttctcgcttcatcgactaaaatggaatcgacttcatcaataacggcaaaatgaagcggacgctgcaccatttgttctttataaagcaccatattgtcacgcaaataatcaaagccgagttcattattcgtggaatacgtgatatcggctgcgtaagcttcgcgtttttcgtcttttgacatcgaattcaggttcaggccgaccgtaagcccgagaaacgtaaaaatttctcccatttgctcagcatcacggcttgccagatattcgttgactgttacgacgtgaacgccttttcccgtcaaagcatttaaatatacgggaagcgtggacgtcagcgttttcccttcccctgttttcatttcggcgatattcccctcatgaagggcaaggccccccatcagctgcactttaaacgggaacatgccggttacgcggcgggaagcttcacgaacgacggcaaacgcttcgacaagaaggtcatccgtcgtttctcctttttcaagccgctctctgaattcttccgttttatgtttaagcgcatcgtcagagagattttcataatctccttttacagcatcaatgtcatttgcaattttttcgtatttgttcagcgcacgtttggtcggatcaaacattttatttaaaatcccaagcatctataacgctcctctatgttcacatgcaaatttcgcatggaataaatgataattttctgtccatgtatacctctcattatcataacataccttttgttatttccaaagaatttgcagataaagatagagaaaaaccttccgcgcgttcacggaaggctggatgggtttattcagtcggttcaattaatccgtatttgccgtcatttctgcggtaaacgacatttgtgagattcgtctccgcattggtgaatacgaagaaattatgtccgagcatattcatttggagaatcgcttcttcattatccatcggttttaaattaaaacgcttttggcggacaatttccgggctgtcatcttcaatttcatcctgaaccgctaccgtgtcagcagcgctcccgttctcgaagtaatgtttcggcagaccctgctcacggaatttccggttgacctttgttttatgctttcggatttgacgttccagcttgtttgttgcgagatcaattgcattgtacatatcctcgttatgcacttcggaacgaagcgccagatcagtcatcggaatggtgacctcaacttttgattccttatcattatagaattttaagttgacgttcacatcggcattgacgctctgctcgaaatatcgttccagcttgccgatttttctctccacatgatcctttaacgcaggtgtaacctcaatgttttctcctctgatattgtagttcatcaaagaacgcctccctttatctaaggatatgtatctatttctcttttaccccttctgatccctgctgaaacgttaaaataatgtgtaaaatcagtgaacgatgacgaatggtgtcggctttttatccggcagcttccggcaggattaaagtatatgcaaagaacgcaggcaaaagacctgccgcttgcagcaggtctaatgaagaacatacggtttgatgcagtcgtgcgtctgctccatccacagcttataatgcggcagaaagatggtttttaaaaactcctgaaatggagcggacgggaaatcataatcatttaacatgctgaaatcctgaaaaatctcgtcaaatgaccgaatcgcagtctccacgcatcggcactcaacgatagacaaaagaagcgcatgagaggagtcgagatgaaaaaaagcctgaatcaaatcgttgtaaatccgttcgccctccgtcttaaaaaaatcatcctgcgtatccaataggtagcaaagcccctcatcaatcgtaaaaagaagctggtagtatgctgacaccaaatggtaatcgttcaaacttctcaaaacactcacctatttgcgtttgtcgtaataacggccgtcacttgtcgtttgatgatacggattaaaatacgtattatggtacacccgttttttcttgagcgtttttatttcatttcggatgccgtcctggatccgtttcacttctccggtaatcaggcggtcaagcgcggtcacctgctgaagcagcgtttgttcttcttcggaaaaaggcggttttatgcccgcaagcatctcttcccttttctccgtaaatgccgtaacgctgctgatgagaccgtcgctttccggagcatccttcagttcggtgtacatgttcttcgtttcgttatacaaggaaaagacattgctgttcatcaggcaaggccgcctgtgccatggctgtttttccgttcgctctgcatggcctgcttccacgtatcgcgaaattcagtaacgagcttttccgcttcatctaaaaatccttcgttattctgcacgttcgcttcgatcaggcggcggcggatgtaatcatagattgatgacatctgctcagaaatctcaatctcccggtttaacgtgatgctgagctcttgaatgatgttttgcgcctttacgatattttcatttttggcttcagggttgttttgcttcatcgcctgcctggccagcttaataaatcgcaggcagccgttataaagcataagggtcagctcttccggagcggctgtaaagacggatgtctgctgataagcagcaaaaggattatttattgccatttttgtgaaacctccaagattatgatgttgaagatcctaacattgacgtgagatatgaagattggctgttcaatttctccaatgccgtatccaacgcgctgaactttttataatatctcgtttcgatgtcatccagcttcgttttcatattagtaatatttgtttctacttcgttcaggctttttccgatggcaaagctggttgataccgagctttccgtgcccgcttgttttgaaatttgagtctgcattttgtttaatgtgtcttttaatctccgggcaatcccctgctcttccgggtttttggttttcgctgtatcagggctgtccgcattaaacagcttagccacgagagacggattctcggtaattttctgcttcagtttcgcttcgtctttaatgacaagctttccttgatcggcgtagttatcagacgtttcaattccgaaatccgcgagctgatattttttcccgtcaatcgtaaccgttgagtacagatcaatccgcatctccgccaaaccgttctgcagcgtgctgtcgctccgtaataaaccgcttttggctttagcctcccactgctcaacctgcttatcagtcatcgcttctctttgatcatcagttaacggcgtataatcccggtattttgattccgtcaccttcgcgtttacgtttttaattaacgtgttatatttatcaacaaaatctttaatgttgttaaagatgccgtccgtatcagtcgtgctgttaatcgtaaccgttttattgctatccgtcacgctgttcagcgtatatttaatgccgttgatcgtaaagttatttgacgttttggtcatttcaaggccgttgaacgtaaacttcgcgtttttcccttcggcattggccgtaagttcattcgttgtatcatcaacggcaaaaccgagctgatctttcagaaagcttttggttgcgtcatcacctgcggcaagggtaaacccttcccccgttttattggaagtgaacgcaatcgtgtccgcataatccgtgccattggaaattttctctcttaaagccgtcatcccgaggcccgagctgttcagtttggaaatcacatcatcaatcgtatcagtcgcggcgatcgtgacgtttacctcagtcggcttcgtgtcacccggatttgtgacattgaatttcaatgtttggctctggcctgatgtaaaattgatggcgcctgaggatttatacgtcgtcggcgtggccagctgctgaacggacatgcttgttgaaatattttgctcagcactgacggccaccgcgctgacactggaatccgaacttgttactgtttttttattccagtttgtggacatcagcatattattaaatgtagtggaatacatgtcggtaatctgggtattcatttcccgataagcatcgcgcttccattcaagcgtctgcttttgctggttcaatttattaagcggctgcttttcggcatccatcagttttttcaccagagaatctacatcaagaccggaattaaggcctgtgattcttgtgaccatatgtaccctctccttttcagcgtttagtcgtagacggctctatgacaacagtgagtttccgactgtttatcatatcgcagctccataaatgtatgatcttattcttatatcggtcatattaaaaggttttcaatattttaactgaaattataatgtttcattttgtcaatagggtttccttggcatgatgagggaaaaagcggaggaaataaaaaaagaccctggagagccaggatctttccgtcattaacctttaagcaattgaagaacttgctgaggctgttggttagcttgcgcaagcattgcttgagaagcctgagtaagaatgttgtttttcgtgtactccatcatctcagaagccatgtctacgtcacggatacgtgattcagcagaagtcaggttctcagaagaagtaccaaggttgttgattgtgtgctctaaacggttttgaaccgcaccaagtttagcgcgctcgctagatactgtgtcgatagctgttttgattgttgtaagagctgaagacgcagctttagcagaagatgagatgtcgatacctttggttacttttgtatctgcagccaatgcgctgtcagcttgataaactagtttatcatcagtgtcatagtagccattcggtcctttagaaccatcagttacgagagttgcttcttttccgtctgcagttacaagcttagacccgtcagtatttgctgtataagtcgtaccaactttcaggctttcagagtccattttattgatagacaggctcattgtttggccttcgttagctccgatttggaacgtaaggtcttttgcagttccgtcaagaagttttttcgtgttgaactcagtgtcagtagagattcttgttacttcagacgctaattggtccatctctttttgaagctcagaacggtcagaatctgtgtttgtatcgttagccgcttgtgtagcaagctcgctcatacgctgaagaatgctgtgagtttcgttcaatgcaccctcagatgtttggataagagagattccgtcttgagcgtttttagacgccatgtctaaaccgcggatttgagaacgcattttttcagagatcgcaagacccgcagcgtcatcaccagcgcggttgatgcgaagacctgaagataatttttccatgtttttagaagcagcgtttgaacctgcattcagctgacggctagtgttaagagccgcgatattgtggttgattctcattttgtatttcctccctgaattgtttttcgcacgtccttgtgcatttttcgcaacgtcattctgaagaaaatttttcctctcattggctacactatatatatcggacggccgcttctattgtttatatgaaaataaaaaaatcctcactttttttgtgaggataaattaagtaataaatcggtattaaaagatacggctctgttgttctcttccaggatcgacaagtatatttctttccggtgaatatccacatgctgaggcgcttcaattcccagcttcacttgctctccttcgatggcaatcacctttatttcaatatcgggtccgatctgaattgactcattcacttttcttgagagaactagcatgatcctcctcctatcagatgttttgtttcataggaagcatcatgtaaaatgatttgtttcgccttcatttcctttttattgacgataatcggcgcttttaaattggcggtcgtgttttcaaaaggctcttccagcgttaaaatcgccatcacttcgacgtcctctatatcttcaatatgcaaaagctcaagcgtcgcatggtcaatgtcaaattcgtaccctttaaagaaaataaacgggctggcgacaataaaggcgatgtgctcctgtttgacagattgcagcgccaaaaacggtgaatcttccgacaaaggaagaacaacaaattgagtctcgtcattaaatcccggcaggccgttttcaaatgagatgatctgcccttcgtctattctgatttctccatgatattttgttttaataatcatgcttcacaatcctttaccactttcatcttttattctgtgttaccgtcgtcaaccgaaatcgtcaccttagggtcttgcatcatatcaatctgaacttttcccggcgtgtaattccataccggtttatgggcggctgcttcaattgaaggtttgcgggcttcaatatcaatcgtcagctttgaaggaatgcagtcaatgtcgacgagaaactgtgcagggagaaagtcgctgaattcgccgaatggctcgggcgggctgacatccgctgcctgccgggccatcacattgccggttttcttttcgatagccgccatttccttcccttctctgactgtttttgcaataaactcactgcatgcttccgcgcctttctgggcggcttccgcgttcagcttttcaaatgatttgagattcaagttctcccaagccctcgtctgatcaatcgtcagtttggccggcgtgctttcaatgttcagctctgccggcggctgctcaatttccaggtcagcgggcggctgttccatttcgatttcttccttctgaaaggtaataccgattttagcaggcacactgtcaataatcaatctcggcatctgcatagaaatccctcctctttagaatgttctagtaaaaaaagcgatctccctgttgtgagtcgctttttttatatattgaagacggtcagttatattatttcagaaagtcgatcagtgacggctgaataatattcgcatttactgacagcgcagctttatgaaccgtctgctgagataaataatcaacaatcacatcttccatttctacatcttcattatctgacaatactttttcagcggtagcagcttgtgattccagccttgtctgaatgagttccaaacggtttgtacgtgcaccgatattggatttttcagcattcattttgtcagtaaaaccgtcgatatctgacagaatctgttttgaatctgcttcggaaagcgtacctttgcttaaagaagcttctaaggagttgagaaattcaaatacattatccccattttgagcgacgcccccgaaagctgaattcgggtcagaattcactttcagcactgccccgttcgagatgttgatgttaacatccgaagcactagtgtaattttcatagttgtacgtatatgtaccgtcagcattttcagtaatcggcgggacgtctgaattggttccgttaaacaggtaacgcccgttcacctgagtattcgcgacagaaacgagctgctttttcagctggccgatttctgtaccgattgcttttaattccgtttcaccgttcgaatcacttttggcctgaaccatcaagtcccggattttccccataatatcggtttctgagtttacgcttgattccgagttttccagccatgtaaaaccttgcgaaacattccgctgatattggtttacctgcgcaagctgagtacggtactgcattcccttcattgcaacgaccgggtcatcagaagctttcgtgatttttttccccgtagacacttgctgctgaagccgatcgagcttgtcataacttgagccgataaatcgaagagaattttttgcgatcatcccttgagttactctcatttacttatctcctatcttcctccggtgcccataccgttaataattttatcgaatatttcatcctgcatcgttatgattcgcgcagcggcattataagcgtgttgaaactgaatcatatttgtcatttcttcatctaaagacacggcgctgactgattgtctcctttgatcggctgaaagagtgttgctttcagagttgttcataagattggccgctttttgtgaattaacgcccagcttgccgataagggattcataaaagtcattaattgtagtggtttcaccgttaatagtcagcttgctgttctgcacggctgccaggttagtcgcgtttgtgccgtcacttttttctccgtttaacgacgctgcgatattgtcagtagacgcgaggattttgtcactgacttttattttcgctgccgcaccttttgccggcaccgcttcatcaccgctgaaatcaaaaaatgccgcgccctgttcgcctgtataggtctttcctttttcgtgaactgcgttaaacgcgtcagcaaaggatagcgccatattgtcaagagccgtcagcatttcagggtagaggcctttttcttctccattcgacatatagccgtatgactcaataagacctaaaagtgagccttttccggtaaatgcatccgcattgacctcgctgctgccgattgacacactcgacacaaggccgctgtccttgtcgtagttgattttcatttctgaaacggtttttgtattaccatccagcagcgttccgagagaattgttgtttccgttcagcaattccacgttaaccgtgccctcagcagtcgccaaggaatgcccgcccgacttattatatgaaacttttatatttgccatagaagataattgatcaatcaatctgtctctttggtcatataaatcattagggagcataccgctcggttcaactgccgctatttgagtattaaggtcattcagctgattgagaattgaattgacctggtccgctgtgttatccagattctttttaatatcaccctgaatgttagtcaacgaggtagatatatagttaaaactttcagcaagagatttcccctgctcctgcaagactgagcgcgctcccgtattttccggattcgtcgccagatcctgaagggcattccaaaacgaactgagcgatccgtttaaaccgttatcgtcaagctctttcatgacgccttccatttgcgataatgaattggaacgggctgtatagtagcctaattttgtattttcagttctgtactgatagtctaaaaaactgtctctgacgcgctccactgaaccggctttaacacctgttccgatttggccggctgtcagatcactgttttttgatacagcgggataaggactcgtcgattgtaacgtgactcgctgccttgtatatccttctgtatttgcatttgcaacgttatttgaaacggtgctcaatgcagtctgctgcgcactcagtgcacgccttgctgtttcgagccccataaaagtcgatggcattgaaaatcctccgttctaagcttttgaatcgaataatgtcaaacggctgacaggctggcgtgccgtttgcggctctttataattcatattctctttttcacccggcattatcatatcgaatgccccggagatgaattgcaaagcctgaatcgtgagctgtttgttcatctcgttcacttctttcagacggtcaagaagcgcagacaaagagtgaaataacccttcaagctcctgtttttcgctgcctgaagttctggagatgcatgcagcaattgtgttgtcctcactgccgctgagaaactgagaagtcagcttgattcgttcttcttcagtctgcccgattgcctgaatatacttttgctctttagtcaatatgttggaaagctcttttgttttacctgctttcagcgcttccgttttctcctcagacagcgtgagcagatgttcatgcagtgcgcaaagtcgcttcagttgatcaataattggctttgctgacattggctttctcctttttattgctttttatagaaattcactattttttcagcgatgctgtttgaatctattttatatgttccgctctctatatccgctttcagctgagcgattttttcctgacgtgttttagtgaccgcatctgacgcattttgaagctcttttgcatgagaagaaatttccactttgtctttcggctttgcagcctctttttgtacggcttgcttttcgtaatttttttggtatggattaacggattgtgttccgtactgattgattttcataggattcctctcgctttctgttcgcagtctaattcttttatcgactgcgttatcagttagtttagggaatcaggtgtttttggtattataggcatagtatgtgtcatttgaactatttttctctttgaattcagcagctgttttttgattcatatggtctaattgcgactcaatatcggtctgacaggacttgcaaaatttccccgtcctgatcggatttccgcacctttcacaagggtatgccaaattcggaagctggctgatctgaatccttttttgtttgataaacttgaggatcagctcttcttcaacacctgtttcctcagtaatctgctgcatcgtcgactgtctgttgacttgctttcttaaaaatttatagacggtttcaaatgctttttcttcttctttaatacatgcctgacatacggtctgcaggttcgttttaaaaaataaagcattgcattttggacaattcgccaattcacccatcgtattaactcctattccttcttttatctgccttatatttctatcaattatatcggcaggataaaagaatgatttagctcctgattaaagtaaaagaggagaccgataacgctttgcctgctgtcagcagagctccggcagcttgatgcagtgtggcgcccgtcgtataaatatcgtctattaaaatgacgttcataccttcggcggagttttcggcagctgaaaactttttttctgcggagagcctttctgttttgctctttttggattgtttttcattgttcagtcggatgaggggggaaatgacgggcattccgagcagcgaggccagcagctcggattgattaaatccgcgctccgccagccgttcggggctcagcggaatagggacgaggatatgtgtatttgccggatatgccgctttaaagccggcagtaaaatcacgttcaaatgtttgaatgattttcgtatcacccctgaatttaaaccgggccaatgagtccttcattgcatcattatacaaaaaaaccgaacggttctgccgcaacaaaaagcgctgttccgtttttgattcccgcgccatgcagtcagcgcattttttgtttgactgctgaggccttccgcataaactgcacacggggccttcgattttttcaaattgattgctgcatgcgctgcatacctcttgctccggcgccagagaaaatagagaactccaagtcagtgatcttgaaattggtgagtcacacaataaacaattcagagaaattacgctccttcccgagtctcacagaactcgctgggattaaccgaaacaatcgccgctgattcagcaagaatgacaagcagcaccgtatttttctgtttatcaaccatctctgcttttgcgtaagcaactttctttttatcagtaacatatgccggttcagcccggtttaatgaaagtgccagtacatcatttttgcatacccggcatgtgcatttcatatgaagctgaggtatatagcggtcgagaagttcctttaatacgatttctttagaattgacaagcatgttgacagctcctcataggaaaagtatgagtatactgtatcacgttttctgaaattaactagtccaacaatttatttttttgtgccaatttgttcatatattctatatgtttttttgctttcttcataccgtttgtcattccgaaatgaaacatgacgacatcaccgctgaaatgtttataatgcctgcccgttctgcctgcaatctgtacgagtgcgctctcagtaaagataggtgcttctgcgccgaggacacaagtctggactttaggtacggtaacccctctttctaaaatcgtagtcgttaccagcaggtcaaaccgtccctctctgaaccgtttcactttatcctttctgcatgtgtcttccgcatgcacgccttctgcacggatgtttaatttctgaaaataatccgttgtctttcttaatatatgtacagacggaacgaataagaaaaccggcagtcgtgattgaagtttttgccggacccaatccgttacagaacgcggcagttttcctttctcaagcttcttcttccaattgccgcaccacaaaaaacgcggctccgggagcggtttccgatgatatctggccggtatgcgaacgcttttcagcaaaccggcctcagccctcttttttaatgtgtctgaaggagttgccgttacataaactagggcgctgtttttctttctggctttatcaaccgcaaatcttaatgtctcatcagctgaaaaaggaaaagcatctacttcatctattatcattacatcaaaaatatctcgatagcgcatcagctggtgagcggttgagatcattagcggagtcaagctgcctttgtcctcactgccgccgtacaaagcagaaacttcgactttctcaaatgcttttttcagtctcggcagcagttcaagtacgacatctgtacgcggagtcgcgacacagacgcgcaagccgtgattcagcgcaaactctatacccggaaacagcatctctgttttccctgatccgcaaaccgcccataccagcagctcttgtttctcttttatcgcttctataagcgcttccgccgcctgcttctgtccgtctgtcagtgttccttcccaagaaagcttgataggctcccagctgttttcagccgctagattccaagagtataatgacgtcagttcatcagcccttcccattacgacacaggaacggcaataggtaatatgtcttttggcagagggcgcccaaaataccgcaaagcgggcttggtcagactggccgcatcggcggcagacataacggtttttccggcggatgactgacggctcggccgttatatattctttttctataaaacgcttgatgcactgatcagaaaacggaatctcagatctcaataaatgcctgccgtaaaagaaatcccgcaccttcgaaaattctgaagcacctccggacatctctcagcctcctttctgctcaaagtatgcctgccgggaaactttttgtcgaattacgaaaataagaaaataaaaaatctccgcccttgaaaacggagatttgcacttagtttttaaaacaccagccgattccgatggcgccttcgcccaaatgggttccgatcacagctccgaaatagctgttatagaattcgacatgaggatatttaccgcttaattcttgaataatttcagcagcttcttcttccctgtttgcatgaatgacagcggcccgcatcgggattcctttacttgcatcctcggcaaacagctccaaaattctagaaatcgcttttttgcgtgtccgaatcttctcaaaaggaacaattagcttattgtcaaaatgaagaataggctttacctttaacagaccgccgataaaagcctgagcactgcttagacgcccgccccgctgcagatgtgataaatcgtccaccataaaataagcacggactgtttttttcatttcttccagctcttttataatctcttccggagagtcaactccgtctttaataagctgtgcagcttttaatgcataaaaaccttgcgctaaacagctgatttctgaatcaaaaggataaactttaatatgatcaaccatagcgtttgccgaagcggcgctgttataagttccgctgattccgctggacaaatgtatgcttatgactgcatcatatgttttgcccagctcttcgtacaatgcgattaattcaccgaaagaaggctgggacgtagtcggcagctcatcatgatttttcacttctttataaaagcttctccagtcgagttctgtttcttctcggaatgttttttcaccgaaaaccacttgaagagggatcatatgaatatgatgttcttctctcatctctatcggaatatatgctgtactgtctgttacaactgcaatattcatcactttacctgccttattaagtacttaatacgtattttaatagatatgtagccgtaaaaaaagacttgccataataggcaagtcttctcacacagactaacgcatctctacccagccgtttttaatggctacgacaacagcttgtgtccggtcattaacgttcattttctgcaaaatattactcacgtggtttttcactgttttctcactgataaacaatgattcaccgattccgcggttgctttttccgtctgcaagcatttgcagcacttcacattcccgtctcgttaatatatgtaatggtctccgaatttccggataaacctcatgctgagggtgagcagaaactccgcttgtcgcaagacggcggaattcgttgacaagattgtgggttactttcgggtgaaggtaagaaccgccctcggctaccactttcactgcctcgattaaagtatccgcgtccatctctttcaggagatagcctcttgcacctgtttttaaagcatgagtcacatagttttcatcatcatggatggagaggataattaccttagattcagggtacagctcaacaagctgcttagtagcctctactccatttacattcggcatattgatatccattatgacgacatcgggatgataatgctcgacgatacgagccgcttcatctccatcgtcaccttctgctaccacttcaaaggtaggttcaaaatccaatattctttttacaccctcacggaatagttgatggtcgtcgataataacaatatttactttagtcacacgctacgcctccttatcctattgttctatatacgccgctgttcggccaatatgtcttttggctctatttaacaaattataggccgagagataaaggaaccttaatcatgataaatgtcccaagacctagtttagagtctatcgttatcgttccttcgagcagatctactctttctttcattcccagcaagccgaatgacttgtttttcttttgtttagcttccttgatatcaaagccttttccgttgtccttaataataagaaccacaaaatcagcagttacttccacttttactgtaatttcctctgattctgaatgcttcagcgcatttgtgacggcttcctgagcgagacggaaaagcgccacttcaaattgcggggcaagccttttgttctccgtgtctccgatgcactgaaaatgtattttcacctttccgttgtattcttcagttgtataaagatattttctcagtgtcggaatcagcccgagatcgtccaatgccatcggtcttaaatcatatataatccttctgacttcgtaaagagcattccgcacattctggcgaagatttctgatttcctgaaagccgtcctccgtgccgcggtcgcggaagatccgttctatcaattccgatctcatcataacatttgccagcatttgagccggaccgtcatgaatttctctggaaactctttttctttcttcctcctgggcttcgataattcttaaaccgaaatcttgtttagcctgcgcatcggcaagcagaagccctacttggcgaaggtcttgattcaggtaattcagaacgacggttatttggctgaccaatgattctgaccgttcaatgatttcctgaagccccaaaagccggcgttctaaatcatctctgcgctcccgcagctgcttttcacgctgctggatcatcgtcagttccacttgaagtttgtgcgccttttcataggcgttgcgaatttcttcttcgctgaacttatggaaatttctgcttacttccgacaagcggtttcttgcatgccgggtatgtacttcgagtttgtcgcccagctcaatgacttcgtacacctgctgtttgatctgtttgagttcttcgaccagctgctcatattgctggcgcgactgctctccgatttgaaaaacctcgtccttactcccgtccacggttttcagcattttcataagtatagaatccaaaactttggagtccatcttcgatttattcatcagtctccctccgtaacggtgttgttatgtatttttattataaatgtaattgaactgcaatttgtgtcgaattataatgaaagaatgcgtatattctagaaaaaaacatttttatatagtatcttactctttcataataccaaaatatgcgcaaaaattctaaagtctgttcgaatttgtagaaacaagtcttttaatgcttgtcaggagggtccagcaatcatgctgcacagctatttaactgttaaagaaacaggtgaacatgagattgtgatcgaaaaatcacgttttatctgccacctgagccgtgccgcttctgaatcggaagcgcaggaatttatacaaaagatcaaaaaacagcactggaatgcgactcataactgctcagcttatctgatcggagaaacggatcagatacaaaaggcgaatgatgacggtgaaccaagcggcacagccggcgtacccatgctggaagtgctgaaaaaacgcggcctgaaagatacctgcgcggtggttacccggtatttcggcggaataaagctcggagcaggcggattgattcgcgcatacgggaagtcagtttctgaggggttaaatcatataggagttacggaacggaagctgatgcggattatgcatacatcggcagattatacgtggctcggcaagatagagaatgaactgagagaatcagtttttttactgaaggagatccattatgcggatcatgtcgaatttgaaacatacgttgaagaaaaagacaaagaagcgtttataaaatggatgacagagctgacgaacggcaaaagtattaatacagagggagaactgacgtatttagaaacagacgtcagccctaaaggagactaatgtaatggctgaacgtgtaagagtacgtgttcgaaagaaaaagaaaaacaaacgaaagattattttcaaacggattttgctgctgcttaccctcgttttgttagttgctgccgggtttggcgggtacaaagtatacaaaacgatcaatgcggcagataatgcatatgatgccctttcccgcggagataaatcaaaactgcgggatgaagtcatcgatatgaagaaaaaaccgttctccattttgtttatggggatcgaaaattatgccacaagcggaaaaggcggacgatcagattctcttattgttgttacccttgatccgagaaataaaacaatgaaaatgctgagtattccgcgtgatacgcgggtgacgcttgccggcgatacaaccggtaaaaagtcaaaaatcaatgcggcttttgctaaaggcggagcggatgaaaccgtctcaactgtagaagacttattaggcataccgattgataagtatgtcactgtcgattttaacggttttaaggatgttattgatgaagtcggcggagtcaatgtaaaggtgccatttgatttcgacgagatgagtgacgtcagtaaaaagaaacggatctacttcaagaaaggaaacatgcatttgaacggtgaacaggctctggcttacgcgcggatgagaaagcaggataagcgcggagacttcggccgtaatgaccgccaaaagcagatcctaaacgcactgatcgaccaaatgtctaaggctggaaatattgctaagatcgataaaatcgctgaaacagcgagcaataacgtacaaacgaatatccgcatcactgaaggactcgcccttcagcagatttacagcggctttaccagcaaaaagattgatacactgaccataacaggaacagatttatatttaggcggaggcggaaccgcgtctacgggcggaacgtattatttccaaccggaccccgccaatctcgaaaaagtacggcaaaccttgcagaagcatttagattatccggccggaagcagcactgcggccgatcctgcttctgacagcaccggaacagacggtacgacggattcaacttccggcggcacaggagcagacggtacgacggattcaacttccggcggcacaggaacagacggcaccactgattcgaattccggcggcacagggaccggcggcacgaccgattcaaccaacggtactgcgggtgcaaacggaacggacagcacacagcccggcaacacaaattcaagcggcacaacaggctattaacagaaaacccgatcctttgagaaggatcgggtttttctatataattaagagaatagcagaatcaaagaaaaagcagaccatttgcatgatctgctctttttaattcttctttaccaatctcttgtaaaacttggtaaatggtttaaattgttcatttactaaccctgtgacctctgctatgatttgcataaatacaatcaatacaaaaataataaacagcgaaagccatatggtcgcgcttttcagcaggatggcactgatgctgaaaataaagccgattaaataaatgatgatgacagccgtgcggtgtgaaagcccgaaggccatcagccggtggtgtatatgtgacttatcaggcgctgaaatcggctgtttgtttagtatccgtctgatgacagcgaacgtcgtatcaaaaatcggcacgcccaaaataatgatcggaatgatgatactgaataaagtcacgcttttataaagacctaataatgagagtactgaaatgacgtatccgagaaagagcgatccggtatctcccataaatatttttgccgggtgaaaattataaaataaaaatccgagtgtgcttcctatcacaacgagagaaagtgacaggataaggattttgcctccggataacgccattactgcgatggtggacagtccgatgaccgacagaccggcagcgagaccgtccaaaccgtcaatcaggttcatcgcgttcgtgataccgacgatccataacacagtcagcgggtaagcgacccatcccaattctaaacgttccgttaaaaacggcacggagaaaaagtccattttcagtcccgtgctcacaatcataatggctacggctaactggacgaaaaactttacctttgcgcttaattggtatttatcatcaagaattcctaaaataacaataataaacgcgcccaccgtgatggcggtcatcttcgtttcattatatatgccggccgcgagcacacccgccgctacgccgataaaaatggccaatccgcccatacggggcattattttatcatgtacttttcggttgctgggctggtcaactgcacctattttgatcgcaattttttttacgataggagttaggattaaaaccgttagcagagagacaaaaaacgcaacaactatgcgaaacatgcgttcgtcaagcataaagaagtctcctttggaattatatgaagtcttttctgatattgaaccgttccttccattataattcttactagttattataacaagcatcatcaaaaagaaacacgcaaatcaaaaaatgcgctttcccttttaatgggagtgcgcatttttcatgattcccgtgcattcgagcatatggccgaataaaacattccaatcccgtcttcgggccaattcacggcgcaatgcctcgtaagatccgccgcgatccgctgccaagagcgattcacaggttgcgatgaaatctgcggggtcgctgccttcaacgtattcataaacataaggccttttgattttggccgtagaagcaaggttgcagccgacaaccggtttgccggcagctaaaaattcaaaaagcttgagcggaaataccgcgtcattataaggcgaatttttataaggcataatgccgatgtcgacgagctgcatataggacggcacttcattcggcgcagcaggtcccgaccagatgacattcggccgcttcagaagcgacttgaaatccggctcatcctcagccgtgttcggacctaccaataaaatcgtccaatccggccgtaaatctgccgtttccgctaaaagcgcgaaatcgagcttcggtttgatgccgccgataaaaccgagaaccggcccatttcttccctgtaaaatgtcttcatccgggtgtttattttcctgtgaaaacaggtcatattccactccgttttcaatggtgaagaccttctggcgcgggttctccagcttttttccgacctcctgatgaagacagtcagatgtgcacgtaatggaatcggcacgctgaatgattctcatttccgcctgttttatgatatttcttctgatatttgacagcacaccggcacgtccgctgatcggagccgcccacagatcactgcaatcgtaaatcacttcatcccaaggaaacagttctgacagaagcggaaaaccggggaaggtgtaccataagcagcagcgggccccttctctttcttccttcagcacgttcagcaatggtgaaagcttattcctgtagcaaaaatctgtatacctgccgaagcggaaagctttctgcttcaggagatcctttactgcgaactgccggattccctcggcaatcccagtcatttgcccgtcatttgcgcgcggggacggacatacccaaatgacgcttttcgtttctttttgcctggcgagaaattcagccagccggtgccgtctgtatctcagccggtcatgaccccattccgccgctccgacgattacgtgaataatcggttccaccttcatcacccagctcctctaacgcctacagtcttttcatgaccgcgtttttcgcatattgcataaaacaccacgaagccttgataaagtgcaggcgctcaatttctctataaacaaaccatgtttttttggcggctttccacttgttgcttgaaattgaattctgcacaagcctgtattctgaaaggcactcattcaggccgtaagctgtaaatccccttttcagaagggacagccatgtcgccaaatcctgccgcgttctgatatcaggcatttgaatctgccccgtctgttctctgtcaatcatgaccgttaaacatccgataatcgtgttttttaaagcttcatcataggacaggctttcaggcgcttgaatcgttttgtccgtcggcgttccgtcctgctccatgacgctgtagcccgtgaatgaaaatgcacaggaccgctctgacataaacgccagctgtttttgaagcttttcctttttccatctgtcatcgctgtccaaaaatgcgacataacgccccttggcatgctcgagggctgtatttctggcagccgcggctccccggtttttgtctaaataaacgacgcggatccgctcatccttttgttcatattgccgtaaaatatctctcgttccgtccgttgaacaatcatccgcgataatcatctcccaatgcgggtggctttggtgtaaaacggattgaatcgtgtcttcgatatattcacttgcattataagacggtgtaatgacagatacgaaaggtttccagtttgtcatggtcacatctccatcgcagatttttaaaaggactctctaaaaaactcaggaatgacaatgaacataaatgcaactgcaatgccgatcaaaacgcccagaaccgctttctttttcggcggcatgccctgtcccgccgtttcactcaccggctctgaattaatgacgccggcagctttcaggttcagctgtgtgtttttcaattcgtataaaaatctttccttatccactttggcatccgcgctgacggtttctccctgaagcgcgtcaatactctgacgaaccacttttgcccgtttttcaaacagctcctgatcattcttcagaaaagtctttatgacagcctgaaacaccgattcggcctcctgtttgtcttggtcgctgtaactgaccgtgatcaatgaatctgactgtgtttcgacagtcagtttactttttacggctgttctttcttcgtctgttttttcaggcagagcctgctttaaaaaagtatcgctcgtcaaaaggagcggaatttcttttgtgttgttataaagcggatgatcataatttcccgcggcgatcgcggctgccgatgtgaaactgctggttccggtgatttttgacggcaatagataaccggccgcccctaggacaacgggcagcgcaatgatccaaatgatattctttttgatacgccgggttaatcttgtcaacatatccttcatctcgcatctccctgtttttcatagtacgccgtaacggcaggctccttttgtaaacgcctcagaatattgaccgccgcaatcacgagtgagagaaatacccagtgaaaaaataaatttgatacggagcttgggctgatgctgcttaccaaaaaaccggccatcgccgtgataagtccttctgtgatcagtcttgactgattttccgtttttctttcatgccatttataaagtgtccaaaaaaggaacaagtagactgtcagatagccgagcatcgtaagcacgccgaagttagccataatctcgacgagccagttgtgcacttcagctacgccgcccgtatcatacacgggctcagcttttaaatagtacgagacgtttcccgcacccactccgaacccccaggaatcaatcacgtagtgaaaggcgttctttaaaagattcgcccgcgcgaggttcgatggaagcgggtgctgtcccggcatcgcctgcggagctgaaaagagattcaagaaggcattggttatacggcccgcaaataaaagcgcaaagagcgcagcacccgcccccgcagcgtacagcgcgagttttttcagcagggaaggcagcaggatgaagacgtatacagccgcccccgcgcatatgcccagcaaactcgcgcgcgaaccggtcaaaatgattaaatacaaagcgcagatcgcaaagagcaggctgacggccttcacataaccgtttttcatatttttcaccgccgccgcgtacagaaagaaactgatgcataaaaacgtcgcgaaatcattttgattaaagaaaacggacgtcggataatgctgtttgtactgcggcccgttataaagcgtggagctcggcagatggtgatgtgtaaaatgattgtaaaagccgatcgccatcacaaaaatggtcatcacaagccatatgccgtaaaaaaccatcagctgatcaaggcgctgaataaacatgacgacgagataaatcaaaaacatgcccatcgccattaaagctaaatatttaatcccgtacgtcacggattttgcccacaatagcgatatgagaccgtatgtaaaccataaggcgaaaaacatcagaaccccttttacattcacccgattccatctgtcaatatgatgccggtttgtcaggatgccggcgatgtgaagggcgcccgccccgattaataacagccggtatataaataagctgaaaaaaccgagatggatggcaaagaaggcctgattcagaaatgtacacgcgatcagtatataaatgagccccataaacatccggccgtttgttgtaaaggcggatatcaaagcaagtccggcaataccgatcatggcggcaagcagcagcacggtgaattttccaaaaccggcatccgctctgaccgcctccagcatgatgaatactcctgtaatgacagcggcaagcagcactagaacatgtgccgctgaacgtttgatactcacatggcaaacccctttccaaaaccggcagccgagccgggctgccgagagcctgaaaacaaatctttttctatcttgccaattcttttatttgccggtcggcatgaaccgcgggacgtccgacggaatgataagtgaatcctgaaaccctcatatattccagcgggaatatatttctgccgtcaatgatgaccggccgtttgagcagctgcttcgccctctgaagatccatctccttgacttccggccaatcagttgtaatcaggcatgcgtccgcgttttcgatggcactgtacagctctgtgtgatattcaatgccgccgtctcctaatacagcagacgcttcgggaatcgcgatcggatcatacgctttcacgtgagcgccctgctctttaagacttgagatgatatcaagagccggggcggagcggacgtcatttgtgtgcggtttaaaagccagccccagtacggccacggttttcccctttaccggaccgatgacgcggttcaatttttccgtaatgcgtagccgctgcttttgattggtttcaatgactgcttccatcatttgaaacggatagcctgcggcgtttgcgatatgcaataaagcggttgtatctttcggaaagcaggagcctccgaacccaatacccgcctgcagaaatttattcccgatgcggctgtctaggccgacgccttctgacacgtgagaaatgtccgccccgacacgttcgcaaatattggcgatatcgttaataaaggatatttttgcggctaaaaaagcatttgcggcatacttaatcatttccgcgctttcaagattggtctttacgatttttgtacggaacggcttatgaagctcttcaataaccgaagcggcatgttcgcttgtggcgccgatgaccgcccgctccatttccatcgtatcccgcactgccgagccttcgcggaggaattcaggatttgacacgacatcaaacggatggtttcccttcgacgcttcgctgacgatttggtaaacgagcttccccgtcccgaccggaacggtgcttttgttgacaatgattttgtatccgttcagctgttctccgattgtctgcgccgctgccttaatataggtcagatcggcttcacccgtatttgacatcggcgtcccgacggcgatatagatgatatcagcggctttcacagccgactcaatttcagccgtaaaggataaacgcccggcactgacatttttttcagctaattcctcaagccccggttcatatatcgggatgactccgttttgcaagcttctgattttcgcttcattgatgtcgcagcaagtcacatgattgccgatttccgcaaaacaagttccagatacaagacctacataccctgttcctaatacagcgatttttttcacagcttcatccctctttcgaaaggttctcctcttgcccggcccggttcattacggtccggtatttctctttcagcgctttcgcgttttggcttgcgtcaaaatacgtgcggacggtttgataaagttcatcggcagtttgcggcgtccaagccgctccttcatcatattgccgaatggattccgccagcgtttcgggtgaacccggtctgatcagcaaacgccggtatttaccgaataatgaagcgacacccccgacatcggtgcaaatcaccggcaccttcagagcgagcgcctcaatgaccacagtcggcataccttcactgtaggacggcagcgccatgatatccgacgccagcagataatcctgtatcttgtcattcggcacttgccccgttacgatgtgagcggcttcccgcaatgaggatttggcgggtccgtcaccgacaaatacggcttcaaatctttggtccaatgactgaacggcttttgataagtcgaaaacacctttttctttgacaagcctgccgataaacacgatcagctttttatcagaaggaagacctagccgttttctgatggcttctttcgtctcattccttttttggaaggcgtcaatcgtgatgccgatcgggagcacgctgcaatccgcttcgctgagctttttcatttgttcccgcagactgccgctgacggcataaatatcagcagcctcccggaccgcaagtgtaaatgcgcgatgagcgcttttgctgtaatgcggatagacattgacatcactgccatgcaatgtcagaacatacggaattcccaaggcctttgagacaatggcggccgctcctcctgacggcatggcgaaatgcgcgtgaatcagatcgggcttcaggccgtgctttttgatcgcggaaagaaccgatgccgccattcttttatgcggctgcgcccatttcagctgcccgggaaccgcccgataaaacggccggtggacggacacgcctttccgccattcatgcgcaggccttatatccttttgccgatatgtctttttcagcatccggaatggcgcagcgagcttcggccgcggacaaatgacggtcatctccgcgccgagctttctcagttcttgtgcctgcgtctcatgaaaaacgccttctcccggcttttcactgctcggatatacacttgtcatccacaataccttcatagcaaacgcccttttcttaatttacttttcatatgcggataagcttttcctaacaggaataaatagcacaatgcgccgcaggctactgagatcgccagacgcagctttacatcaaggctgatccgctcggtgccgaagctggctgtaaaagcgatgacacccattgccgccgtaagcagaaacggtttggccacggctttgaaataagccgacagacgcagtttaatgacatatgccaacagccagcgcccgatcaggaaattcaggatgctgatgaaagcgtacgtccaggctacagtcaagaggctgccggacagcacggcggcgtataaagacgcaccatacagcagcatcaccccggcatcccaataaaacgccagatcagcccgcccttttgccagcagcactgatccgttcgggttcatcaggacccttaaaatcccgacgatggcgagaacgtttaagactgggacagccgtaagccatttttctccgaaaaccgaagccacgaatgcatccgatactgaaaccaaaccgagcaaaagcggaaaagaaatcagcgcgagcattttggtcatattgagaaatccttctctgatgacgctgttttcatgcttgtttttcgcaaagacgggaaatgccactcttgtaatgatcggattaatctttaataccggaagcgtgacgatctgataggccaaattgtaaatgccgagcgcctccgcgccgataaaactgccgatcagaatcatatcaatattcgccccgagccggttcacaagccgggaagacagctgaaaggccccgaaagaaaagaaacctttcatccccttcagatcaaaaacaaacgccggcctccatgtttttctgcaggatatccagtacagaagaccttttgacgattgcagcagcacctgagaaatcacatacgcgagaatcggatcggtataaaaaaccgcagccgccaaataaacgaaggacagcacatttgaaaagatttcaatcttgcttaacgtgttaaacgccagcgctttttgcagcatatactgatattgctggccgatcggtgcgattaaaaacatgacggccagcacgcggatcaaataggcaagctcctcccgccgataaaaatcggcaatgagcggactgctgaaaaacagaagcgcaaacagcgcaagtcccgttatgatattcagccagtacagggaagacatctgtttttcagttacatgatctttttgaatgagcgcggcgccaaagcccatatcaagcgcaatttgggcaaacaccacaaccgttgtgatcatgccgacaaggccgaattcagccagtgacatgacccgcccgagcaaggcgaattgaacgacttgaatgaccgtaatacacgctgtcgaaatacttgtccatttagcgccgcgcaagatttgatttgtaatactaggcatcgttttccctacttttttgtctgctgaccagaattttctatcgtgccccgtcaccggtccagatcactttgcacgttttgagcataatcttcagttccaatgaaaaggtcaggtttcggatataatataagtcaaacatcagcttttccctcggtgtcatgtcatatcccccgttgacctgcgcccagccgcttaatccaggcttaacagccagccgctccgtaaatccgggaatctcagcctgaaactgttccgtaaaaacgggccgttcgggacgcgggccgatcaggctcatttctccccgcagcacatttaacagctgcggcagctcatcaatacgggtccttctgataaaagcgccgacctttgttacgcgggggtcctttttcagcgcccagaccgcccccgatttttcagcatctattttcatagagcggagcttatacaaataaaacggcttcccgtctttgcctacccgctcctgcttataaaaagccgggccgggcgactccaaacgaatcagtatggagaacaggcccattaccgggagtgccgccaaaagccccgcaagcgcaaacacaatgtccatgaatcgcttaaaagctaaataacgggccgttctttccgttacggcagcggaagtcccctgccgcactgcatagttattatttacattcatgcttttctctgctcccactgacacacacctcacgatttgttgggatgtttgatgacctatgccgtgagtttagcagatggatgttaattggaagtaaaggaaacgttaatgtttattagaatgtttcgattattgtttttttattgtaaatctattcatatccataaacggcggttactataattagaaaatgataatgatgagcgcgtaacagcgcaaaaagcctgccggtcaattctgaccggcaggctccgtacaaaaatatataaaaggtttacttataataagacacgattccatcattgatggctgcagctgtcttttccttataagatgcttgttttaatttacttgcatcagacggattcgtaataaaagccgtctctaccaatacactaggcattttggaatatttaatgacatagaatggagccgttttaacccctctgtctcttgttgataatgcattaacaaccttgggctgaatttgttcagccaggcgtttgcttgcagcagcttgatatgtctcatcatagtaggtctcagttccgtttgcagaagtcgcgtcatttgcattgccgtgaacactgatgaataaatcagctcctgcggttgcgcctttatttaccctttcctgcagggaataaaatgtatcattggacctcgtcatgaccggaagagcacctgaagcatttaattttgtattcagccttttaccgatatcaaggttgacgtctttttctaaaattccgttacctatagaaccggaatcttgatctccatgaccgggatcaattaaaattgtttttcccgatactggatttttcagctgattggctacatttgagctgacagccggggtgttcccgataatggtaaaactgcttaatttttttcttcctataattactcttgtctcttttgagagattgcttccgtttgtcagaatgatagattgttttttctttgcagcaagcgcggcccccgctattgagtctgcatatccgaaaccattgctgacaaatacattgcctgtcggaagatttaactgctgaactaaattggccgcaagttcatatcggttgcttccgctgattctttttggagaaggaagtttattaaagactgaagcatttatgctcccggttccccctgctacaatagagcttttgattcccttgctttttatagctcctgctgtcgcgctgttaatatctgtttgattcgtaaataaaattggatatccgttcattgcggcatatggaattgcagcgattgcatcagcatataaaaatccgtttgcaataactgcttttgaagcggcaggcatttcctttgctactttagctgccgtatcatatcggttgcttcctgaaattctcttaacactgatgccgagcgctttgatttgatttgctgtatttgctgatacagcaggcgtgcctccgacgataatgaccgtttttgtttttaattctttcagacgggttttcgtctctgatgacaaattatctttgtttgtgtaaagcagcggagcatttttttgatatgccataggcgcggcggatatagcatctgcatacgatcctccgccgacgacaacagctgtactcgctgttgaatacacctgcttggaaagtgcagcagccgtaccgtacctgttgcttccccctactcttttaaccgcgttgtcagctaaagctgacgggataaataagatgagtcccagcatagaaattatcaggactttaagataagaacgcaattgccttcctcctgctctcttttatttaatagtcagtcaatgttgtgcccgggtaataaaattttaaaatcgaactatatgaatctcctgattccgcccttgccttagcgccgtattggctcatgccgataccgtgcccgtatccctttccggtgattgtaaaagccgagccgttttggctgacagtcacataagtgcttttaaatacggaggctccgatcatcgtcctcaattcagtcaccggcacagtcattgcagccgttttatttgcctcgtaatttccattgttatttttgacagcgtaatttactttcaaagttgctgttttggcccgctgtcctttagttgttccgctgaatgtaaaatcttctatttttataattttaatggcggaagcgccagtttccttattttttaaaagccaatttttaataccgctcagttgagctgcatttgtctcattcttcgaagcaaaccaagatgccggctgatttacattaattgaatctgtgttgatttgctgcttagaaagtgtcagactccaggccgtttgaggatcttttgtgtctttttttgcagttaaataaggaacgcttgaaccccatacttcgtcgcttgattctgtataaccgccattactcgatgaataagatgccgtaattaaatttccgttgtaagtcagcactttatttttcgtctgctgcaccgctttagttgtattggcgttccagctgtacccgccatatacttgaaaagcagtagtatcagctacagtgctcccggtcttcgtaattgagtatgttcttgccgcaactgtttgcgccttgagtgcttcaagagaccagcttgcgggcatttcattcggtacgacacctttcaaataatcttcaaaaggaatattttcatttacaggtctgatatatttgcctgactctattgaaaaattaatcgtccctaagtattcttttccatttaaacttatccggttggattcattgtatgtttccggttttattctcagagaattcccgtatgttttaatatgattaagacttaactttccattattgatttgtaagttatatgtgcttccgccggctaagtaaaaatgatttgaaagctcattttcaactccggcggaaattgagcttgtacttccgataaagtcgtatgcatacgacgccttctcttttgtcactgatttagctgctgaaggaacattatcttgtttgatatataaaatttgactgccttttttggcagctagagaagcacccaccagaacatcagcatatttagttccattagtcatgacgactttatcagccttcaactttagctgattaatgatattagcagtcaattcatacctcgttgacccgggtatgcgctgcacagttgaagtttttttaatttgattttctactgcatcactcacgctgaacgaactcccgataattaagacttgcttcggaaggtcataatccggcaatttatccttttcagtcagtaatatgggatagccgtttgcagcggcatacggagctatggctaaagcgtcttgaaaaacattccctgttacaacaattgctttatcataattgcccatttgttttgcaatgttttcagaaagaacataacgatttttcccgctgattcttttcacagctgcataagacttaagcttattttcaacgtccttcgagatgcttttagccccgccgatgaccaggatattatcggggttgaacttagcaatctgtttttctgttgttttggtcagagtgtccggctgtgtaaataacactggtgcatccaattttttcgccaaaggaattacaggtaatgcatcgataaaaacatcacgattgacaagaataactgttttagggttcgtccattgggagtcagatgccagagccgccgtctcatatcgcgatgctcccgaaaaacggtcggttacagctacgtgatcaccagtaacctgataaaaccctgttggagataaagaaatacttgattgatttcctatgtaatttgtcagctttactgagatttcggaatctgccgcaaaggtaaccgcaggtatgaacagtaaaacaacagctagagtcagtcctattaaatgtttgcaagttttcaagattacagcgtcctcctatttcttaatttgccggttcaatatccttcagcacaagctgtcctttgctatttttttgatattttactgtcactttttcgccattatttaaattcttcacatcatccgctgattcttcagtgatatcaaaacttaccggttcatgatcgacagtaacttctattgtatgagtatccgccagccctacataagtgccctctttcgttaccagcttttcacctgcatcctcgccttgggatttttcattggtaactccgcacccggctagaagcagtataaagaacaaacatccaaaaatttttttcatttttttcacctcattatggattatcgacaatatattatctattttaaagaaaaattaagaaacattgaaacttttttcgataatattcgactatattaggatttaatgtatttattatataatcttgtatttgctggaagtccaattttcaattaaaacagatggggtgtattgagatgagaagtaaacgaagaaaaaagaaaaagactttgttactggtctttctgacaatcatcggcatttttattttagtttccggcggctttacatactatctatggcataaagcggcatcaactgtcgcaagcattcacgaagacattaacaaatcgaataaacgcagtactgaggtaaaaataaataaacacgaaccgttctctgtcttaatcatgggcgtagatgaacgtaaaaatgataaaggtagggccgactcgctcatttaccttacagtcaatccaaagacaaaaacaacggacatggtcagtattccgcgagacacatatacaaaaattatcggcaaaggcacgatggataaaatcaatcattcatacgcattcggcggtacacaaatggcagtagatacggtggagaatttcttggaccttcctgtagattacttcattaaagtaaacatggaaagctttaaagctgtcgttgacactttaggcggcatcactgtcaacagtacattcgctttcaactatgacggttattccttcagcaaaggcaatatttcattaaacggtgatgaagccctcgcctactcacgaatgcgaaaagaagatcctaaaggagacttcggccgtcaagacagacagcggcagattatagagggtattatcaataaaggggcaaatatctcttctgtcacgaaattcggagatatgtttaaagtggtagagaacaatgtaaaaacgaatttaacttttgatgatatgtgggatattcaatccggttataaagatgcccgcaagaaagtgattcagcatgaattgaagggtgacggcaccaaaattaacggaatttactattacaaagcagatgaaaacggacttgcttctattacaaaagaattaaaaagcagtctcaacctttaattaatgaagaaaaagcagcttcgcatacttatgcggagctgcttccttgttacacctcaaatgaatcaggacgctctgaacgcagtccgaattgatagagcagcccctcagcaatccttcttgatgccataccatctccatagggattagatgcccgcgacattttttcatattcttgtttatcagttagcagctgttttgtcagctgataaatcgtttcttcatcagtaccggctaatttcagcgtgcccgcctccactccttcgggccgttcagtagtatcgcgtaatacgagaaccggctttcctaaggaaggagcttcctcctgaacgcctcctgaatcagttaaaatgaaatacgaccttgacgcaaaattgtggaaatcaatcacttcaagaggttcaatcaaatggacacgcttcgaatcaccaaagtgcttatcagcagcttcacgtacagccggattcaagtgtaccggataaacgacttgaacatcgctgaactcgtctgcgatccggcggatggctttaaacatatgttccataggctgacctaaattttccctgcggtgcgccgtcagtaaaatcattctgtcattgccgattgtttcaaacatcctgtgtgaatattcagagtgaaccgttgtattcagagcatcaatcgctgtatttccggtaacaaaaattgagctttcttttttattctcattcagtaaattttgcttcgcttgctgtgtcggagcaaagtggatatcagcaagcgctccggtcatttgacggttcagttcttccggaaacggagaatatttgttgcccgtccgcaatccggcctctacgtgaccgactgcaatctgatgataaaaagctgcaaggcttccggcaaaggtggttgtcgtatcaccgtgaacaagaacaatatcaggcttgatttccttaaacagaccgtccagtttcaccaaggcgtttgaagtgatttcggccagcgtctgccgttctttcataatattcagatcgaaatcaggcttaatacgaaatgcgtggagaacttgatccagcatttgtctgtgctgggcagttacagtgacatatgattcaatttcagggtatttttttaattcaagcacaaggggcgccatttttatcgcttcaggccttgtaccgaataccgtcatgactttaagttttttcatgtctatttctcctgtatctggtttgtgtcatttttcattatcaatccattttacacgatatgatccgcgggttaaatatcttgtattattttcccctaattgaaaaaggatatatcattaaggctttgcggataaaacttgtttaataatggtttatcttatatcattaaaagtgttaaaaatgaaatatcgggtatacagaaaatatcagcaagcctgagtctgtataaatatcataacttatcatttaagtgacgctaaggaaggtgctttaaattgaaaaaagtacgcaaagccataatccccgctgcaggtttagggacacgctttctgccggcaactaaagccatgccgaaagagatgcttccgattgtagacaaaccaactattcaatacataattgaagaagcggtagaagcgggtattgaagacattattattgttacgggaaaaagcaagagagcaattgaagatcattttgattattcaccagagctcgaaagaaacctagaggaaaaaggaaagattgaactcttagaaaaagtccgaaaagcctctaaccttgctgacattcattatatccggcaaaaggagccaaaaggtcttggacatgccgtttggtgcgcacgtaattttatcggtgacgagccattcgccgtccttctcggagatgatatcgttcaagcagagaaaccaggacttcgtcagctgatggatgaatatgaaaaaacactttcttctattataggggttcagcaagtgcctgaggaagaaacccatcgatacggaattattgatccgctgacaagtgaaggccgcagatatcaggtgaagaactttgttgaaaagccgccgcaagggactgctccgtccaaccttgcaatactgggacgttatgtcttcactcctgaaatcttcatgtatcttgaagaacagcaaattggtgccggaggagaaattcagcttacagacgctattcaaagactgaatgaaatccaacgggtttttgcctacgattttgagggcaaaagatatgatgttggtgaaaaactaggctttattaccactacattagaatttgcgatgcaggatcatgaactgcgtgatcatctcattcctttcatggaagacctgttaagaaaagatgaattataagagaaaaaagctgttggaataaatccaacagctttttattttaaaatgcaggttaatgtttgattgtcgttattgatgataaaagcgtatttatcattttcggcaataaattgccgatcaccgcttccctttataacatcttgattattcagagatagatctgccggagtaacagccgatattcctctgaaaacaagctgctcggccttgccattctttattacataactaacctggccatttttaagatacaatgtctcccggccattcacgacttctttctgcaactctttagtttcttgctgaatatcattaacgcgctctcccagaagggaaacaagttggtcagcatcactctgctttacatacggtgaaaaagccgatgctttcacatttgaactttttccgttaaagactgctgcgttttgcgggatatagtacgttttattgttaatctcaatctttgccgattgcctgtcttcagatacaactttaatctgagcaccgaacggaataaggaagtcagccttttttttcagctctgtatctttatacgcttgcgtctgatcttttaatacgaaaccttttttattcaccgatgtctggtatttccccttattgatatcatcttgatatccgatcttaccgaacgaagcgatcgtacggagcggggcgctgaaaaacatggttccggctataaacacaagcagtattgataatattgcaatttgaacagcattgactgctgatccggatttatttcttttcttttgttcctttacaatcgcctgctgctcaggcgattcttttttacgctcagcaacctgatctttcttatatttctctttgtcttttttggagagcttattaaaccaatcgataaatgatttgtactctttgactacggtttcagtatcgtcgaacattcttaattcaccatagtgcatccaagccacacggtcacacattttttcaatctgaccgatggaatgactcacaaagaaaatggtttttccttgttccttaaattcctggatccggtcaacacacttctgataaaatgtctggtcccctacagagagggcttcatcaatgattaagatatccggatctatatgcacggaaatagcaaagccaaggcgggacttcataccgctcgaatagtttttcaccggctgattaataaaatcaccgatctcagcaaactcaactatgctgtcatacatctcatcgatttctttatttgtcagccccatcattaaacatttgagtcttatgttatcccggccagtcaaggcattatttaaaccggccgcaatcgcaataagcgacggctggccgttcatttcaatttcaccgcttgtcggcggtattacttttgcaagcagatttgacatcgtcgatttacccgatccgttaattcctacaaagccgattgtctccccttcatatacatcaaaggagacatttcgcacagcgaaaaaaccgttatctttagcagggaaaaacaaaccttttattttgtccgactgtttttcataaagatgatactgctttgaaacatttcgaaacgaaacttttagtttcatcgtacaatctccttacgtattaaagaaagtcaataaacttatctctgaatttcatgtgtaaaacagaaccgactgttaataaaaataaagtgaacagccagaaatacagtgtatatttcatatcttgaaagaaccactgaccatctaagaaactgttcctgaatccgtcaataatataaaaaagcggattcagcttcaggaccggcaccaattccgggtgatctgcccccagcttcgagtgaatgtcccaaaaaatcggcagcaggaaaaacaaaagtcttgtcactgcctgaagaagaaactgatagtctcggatcagcacgctgattgtcgaattaaacaagctgaacgaaaataagaaagccatcagacatacaaaataataaatatattgaagccaatgaaggctcggatagattccgctggcaagcaatgcaatgatatatatcaccatcataattgcataactgaacaaattagaagcgatggcgacggacggcaaagaactgattggaaaattcattttagcaaccattttaattcttttaaatacactatttgatccgtctagtattgtcggacttataaaaaaccacggtatcagacctgcaagcatccacagaatgaaaggcacttctccggcacctgtagccatcggccctccttttctgattcccaatccaaaaacaaaccaataggcaagcatttgaataagaggatttaaaaactgccataaaacgcctaaataattcatttgatatttagactttgtttcgtaggccgctaaacgcatgattaaaggaaatgatgttacttgctcttttagtattttcactacagcattcattttaatcttccttaggttgatttgattttataaagcatcgctgataattgtaccagaaattaatttttttttcactttcaagccgcatgcaaatgctgctaaaagctttgtaaagccataatagaaaaaccccttgatacaaaggggtttttctattattcagattcaaacacaatctttacgactttttcagaagaatgtcctgattccagataacagaacttgtcgtaaaaaggtttgaatgaaactgggtgctgataacccggtgatgaaatgtgtttgattgcatcgattgtttcttctgtcgtttttactaacggtccgggagcatctttctcaaaatcgaagtaaaaccctctgagtttgtcccggtacgtttcaatatcaggaacaaaaaacagcatcggacgcttcagatttgcaaaatcgaaaaatactgaagagtaatccgtgattaacagatctgaaatcatatacaattcacgaatatcttcgtgggcagaaaaatcgtaagcaaacccttcaaacggacccaggtcaaaattttcagccacaagataatgcattctcagaataacgagatattcatctccgagctcttcccttaatttgtgcaggtccaaatcaaggtcaaatttataacgcccttttgcataaaattggtcatctctccatgtcggcgcataaagaataattttcttgtcctctggcaagtgtaatcttcttttgatcgctgtgattgtctcttcattattgtcattatgaagaaagtcatttctcggataacctgactcaatcattgttttctcgaattggaaggcgcgcgcaaatatctcagacgaataggcattcggtgaaattaaataatcccaatttgatgcctctttaataaaattctttttatattttttcgtattggtacccggcatatggacttcttccatatccattgcaagtctttttaaaggcgtgccgtgccatgtttgaagataggttgtatgttccggctttggaatccataaaggcagacggctgttgactacccaatactctgcccgcgccatagcaaacagccacttgattgagagcctgttaatgtattgaatgcccttctctttaaaaggcgctgtatactgcttatttacgctccaatacattttatattccggatgattgatttgcatgtattcataaatggctctcgggttacagctgtattgcttgccgttaaagctttcaaaaataatggtcttgcttttgacaggcattttgctcgccattctgaaaacaactttataacccttcgtaataagagaatttctgcgttttttcagtttttttattttagaaatgaaacgctttttctttccttttatgaagtattttacccttgttttcaggctgtagtcgttcacacggatacagacagtctgctttttcttctttttatatacttcatatctgaccggcccgctgtctttattcacaacgctaatgaggcctttcagtttatttttcctatccccaagcacaagcggagtgctggtgataacaatatgttcagattcctcgttttcacaatgaaattccataaacatgcggtagacaaatcgtttttccagagaataaggaatatcttttaatggaatctttatttggaaatcaaaaatttcaggagtgaatgcatcttctcgaagctcttcaatattctccgctttttttgtcatttcaataggaaaatgtttttctacggggtcttctcccccttttttaatgacaaattgcaaatttttaactgagagctgattctctgaactaagatatccggcataccctgaaatattaatctcttctgccttcagctgaatctcatcaaatttcacgattttcgcttctctttttacttttaaagagaaattacccttatcggttgtataaggcaaaattaacagctcagtcgtatgatcaaggtggtaggcacgctcaatcgcttccgcttccacggataaacgcacctgcatcggctgttcttcctcctccgcagccggctcacccaaaaccacataaaaatcataagtctgtcccatttctaaaggttcaggaaacgagtgaatattaattgaagtgctgtattgcgccgggctctctttctctaaaagaacaaaatcctccgctccggaacgccgttcttttaattttaaataatatttcacttcctcagctaatggttcttcgctttcaagtgaaatagagagcatcagatcgcccacattattttttaagcttttcaaaatacatttaatcacagtattttcatccatacttattttctgctcctctgtattaaagctcttcacttagccgatttcacttaatcgatgtgatcctttttgtttaatttaatagagaaattacctttcactgtcgtataaggttcaaaaatatatccgttattcataaaccggtccttttcgccgaggttgacttcacggctggatacccttctttgaatacgtatacggtcagctgatacaaactgaatgtaaaagtcaagaaccgaagtttgattggcctcgattttctcttttttgatgtccttttcaaaattaatcgtaaacgtctgagccggctgatcagaggatacggatatgatttcagctttgtttttccgatcaatcccaatcaggctgactttttcaaacacatcatttgggtcagacactgaaacgctgatcgctagtccgtcgccgtttttttcaaaagatgtaatcggctgttctttagagccgactttttcagcgagccgttccttttcttttctcacttcaatcattttggaaagagcatatgaccaatttttaatatagtttggtttagagtatttttcagccattttaaaggcctgacgtgaaaattgttgatgagtgctgtcatctctcattaaagagataatggcctccgctaatttttctatattatattgctcgataacatagccgtttactccatcttctaccaagcttctggcaccgtaatcgtaatcgtaagttacgaccgggcatccgttgctcaatgcttccatatttgacagaccgaagccttcaaagtgagacgtcgaaattgtcagccatgctttttgaaactcgtaatcagggttattcgtgtatcctttcagcaatacattatccttgaggttttgagcttcaatttcctttttgattttttctgtatcttctccggaaccgaatatgtccagtttcgcatccgggatttcatctacgacaagtttgaacgctttaacggcatgcgtcagatttttcattgcggcaagccttgagataataaccgctttatttcgttcactcggaacgttcaaaacctcttcatcaagcggtttattaatcgtatgcggcgtaaaaaagaatgtctctttttctcccgtaatcaaagtgaaatctgcaatctgctcctcagtaataaaaaatacggcatccagattattcatctgaccgaaaacttctttataacgccctttgatctgtaatttactatcaccataatgtttgttgtgaataatcgcagcgtaatatgatgacggcgctttttttactctgaagacatgtttgtcctgaggtctgctgtcgaccagaaatagtttaggccgatcgttttcattttgaagaacgtctatccaatgccggcgcagctcagattcatctttaaatgttaatggaccttcctccgtgtaccacgtaaaatgtgttaatttgacttcttcactttggctgtcccacatgtagtgtttttccaaataaacgacattttcgctgttgataaactcctgaaggaagatttgattaatcttggtatcaaaatgagagacaatgacagcctgtccttctttattgtattcttccctttttattacttgtttttcatcattcaggtagtctacgtaacgtaccgccgcaccgcctgaataataggaaagaatataatcatttgatgatttgccgaatatttttgagattgctttgcttactttccccttgctgacatgtctttttatttgatccagctcaattttctctgaataaatccgcttgccttttgtttttttacttaaaaagtcatcatacatgttgataacttgtgtgtattcggagtcagcttttccattttcaaacagctcgttcttttttcttgcaaactctaaatcaaatctaaaagtaagaaaggcggttttcttttggctttcttctccgaagagtttagagcgcaataatagtgatttggtcaggcctccgtaattatccggcagtccgcctgagataaaataatacatcatatcgggaaactcattattatagttaataggctgattggacaaattttttctccctttcaccatatgaatttaataaaacactgcaaaataatactattcccgcagattaaattaacaaaaccaatttaagcatcaaaaagtacttcttatctaaaaataagaagtactttgatggtttttcacgcaatctattaaattcccgtattacaccccggcaatttcttttttaatctgtgtagtggaaataccttcggttctagggagatagatgacttcgcattgatctttaaggaagtcgaatttgccttcccaatcgtctcccattacgaacacgtcgatgttgtgatccgctacgtcccgtactttttgatcccagctgttttccggaatgacttcgtcgacataacggatggtttccagaatcagctttctgtgttcatagctgtgataggcctttttttgtttttgaaggttgaactcatctgttgagatggcaacgacaaggtaatctccaagctgctttgcgcgctcaagcagtttaatatgaccccaatgcagtaaatcaaacgttccgtaagtaatgaccttcttcatgaaacaaaagctcctttctatcatcatacgtataacaagcaactgccctgaaatgctgcgcagctgtatccttaatcactaaagtgccaatttcgtactcatggaacctcattatatcacatagccctgaaaaggttaagctaatgtaaagcgaagttaaattccttttattaacaattgttattacaataggagtttagcagggttttcacgcgtatgattaaagaaattgttatcttatttatatttttgtaaaactattgttaagtttatctgaaggtattatgttaaaataaagcttagcctaagtcacgaaaaagtgaaaggaaatcccgtacaaaaggaggacggcagatgcagactgaaatggtgcacaacctttcttatgttaatggaaatttacaggagtttatttcatatttagacacttattatatcgcacaaaagcaaggtgccgtcattgcgacggtcaaccctgagatcggatacgctgcggcgaaagacaaaggttatcatcaagtcatttcttccgcggatttcgtcctgccggatggtatcggcgtcgtgttaatgtcccgtttgacgcagcacccgctgaaatcaagaattgcgggattcgatgtgtttctttcgctgctcggtctcgcaaaccggcagtctaaaaaaatatttttatacggagctaaacaagacgtgcttgatgccgttttgaatcggatcagcaaagagtatccgcatatcgaagttgtcggagccagcaacggctatgaagcggataaacgcttcgtcgccaaacagatttcccgggcgaaacccgatatcgtgtttgtcgccttaggttatccgcatcaggaacaatttatttatgaaaacaaacatcttttccctcaggctgtatcgatcggtttgggcggaagccttgatgttttcagcggaacggtgaaacgcgcccctcgatggatgatcaaaacgaatctggaatggctgtaccggctggtgacaaatccgtggagatggaaaaggatgctgaacattccgaagtatgcttttaccgttttgagagataataaatcaaataaaagtctgtattccaagcaggctgaagatcaaacgaaacagctttaaacaaataaaactgcaaaagagattggtaatctatgaacttgcgatctttattcgccgctttctattctatatatctgacggttctcggcgttttgttcaagcctttgaaggcaaagaatcatctgaccctgctggtatcttttgaagagaatgcgcaggctctcatccgttcttacaaggcgcacgctgaatcgctttcttatgaagtgacggttctgtatacgagacacgccgtcagtctggaaaaagagctggaaggtctcggctctttttatctgaacgaaaaaaacccgctgcatcttgtgaaggccgtttccatcctttttaagagcaaagcggtcataacggataactattttctcctgacgagcgttttaaaccgccggccgcaaacgacatgcattcaggtgtggcatgcgaacggttctttgaaaaagttcggccttgaggatgtgacgaatcaaaaccgtcctgcatcagacatcagccgttttaaaaaagtgtaccgttcgtttgattttgtcaccgtcggctcagacgcgatggctgacgtttttaaaaagtcattcggaatacgggagggccagctgttaaaaacgggtgtccccctgactgacgtctattatgaagaaaacaagccgcaactgaagcgcaaatggccgaaaaaaatcatcctgtacgcaccgacattcagggattatgatatgcagtccttcaggctcccattcaccgaagaacagctcacaaacgaattaaacggagagtatatgctgcttgtaaaacttcaccctgccgttttgaatcagatttcggcttcgtttgaaagcgaatcgatcaagaatgtgtctgacatgcgtcttcatgatctcttgaaggcggcagatattttaattacggactactcttccgtaccttttgaattcgcgcttttaaataaaccgattttctttttcacatatgatctggaagaatatgatcaaaagcgcggtttaatcgacaattatacgtccgttattcccgggaaggcatgtcatgacagcggagcccttctggaggaaatgacgaaagagcaatttaacgcagaagaaatgaagcggttctcggacaaatggaatatgtactcaaacggggattcgagtgaagcgttattgaaatttgcagagacaaaaatgaaaaaaagagatgaagcacctgcctgaatccgacggcaggtgtttttttgcatgaagaaaggctgaagcatacacttcagccctttttttacaccttcatatagacaggaacatcatagtaaagcgtatagtcatccagcagtgagtataagctgtacatgcggtttacctgcttatacgcccagccgatatctgtcgcatactgatgggacgcggtttgagaccatctcattttatacagcgtgtcctgttcgtatgcggggttgtgaatatatgacgcaccgatgaattgggctccgccgataatcgcggcttccggagtaaaccagccctgattatacgcgtattgtgcgccgtagtaattcgggttgctgtcataagccccgatgccatacatgttataaaccttttttccattatacgtaatgccgtttgcaagctctgacgtgccattgcccgtttcaagcaaagcatgcgaaatcaaatacacttcattgatgctgtatttgccggcggctgtaataaaggcctggccttttcctgtcagtattcctttattgaccagcactttttgattcagttccgatgcgttcaatccggctgtctgagaaagcttcagaaattgaaagtaatacttgctgtcttgcgcaaagtaatccggattgacgtattgctcgacttcattactgctggcgtttctccagcccatactgagcttggcccagccgtttgtctggccgatgatgctgactttatcgccttttttcagctggccgataatattgccggagctgacttccggagttgatcggacgttcaggacgtctgctgtgaccgttccggaagccgtattgatgtaagtaagcgacgcgtaagccgcggcatcagtctgcgggctgactgtcatttgttttttgaccatatctgcaaccgagatgttgtaattggtattcatgatttgcggtccgttctttattttcaaaatggccatcgtccatccgtacagctttttcagcttttgggaagcggcttctgcggaatcggctcccgtgaattgatcgcggatgcggagctcataaaccggctggctttgactcgtataaccggcctgcaattgtttggcgctgaaatagctcatgcttttatttaaaacggttttactgctgaacttttcggttttgatgacgtactgtgaataggcggttttccccgtctccttcacagtgccggccgctttgttttgcttgaaaaaggcagtcacgcggtcaatgtcttcctttttaagcagcggtgccgtttcaatcctgaattgtgtatacgctgtttcgcctgttttctgtgcggcagcggatacttttttccctttgaagaaatccagtgaacgattgatctttgccgtatcaagcagtgattcggttgtgacttggtacgccgcccccgtttgcttggctacggttttggaaacagcagtcagcttatatccggccagcagattcaatcctttttttatcttcgactggtctgccgtctgttgagaaagcagctggtattcgttttctgatgtttttcccgcggcggttcttgccgtctttacatgctgctggcggaaaaacgcctccgcttgatctgcctgtgcggcggtaagctgtcctgccgtgatccggtaagcggacaccgacgccggctttttgacaggtgatgcgtcacaatgccattttttctttttaaagaaagattgaacgctttgcagctgcttagccgtcagtccgctcatcgcgaccgtataattatttttcgtgccggctttttgatagtttccgctgacgccggtattcttcttgatttggctgacggcattttgtgctgcgctgactccgttaaaataccctgactgcacattgtacacggttgccgttttgctttgggcatacttttgaacattccctttgacacccgttttctgctgcagctgtttcgctaagcctgccgcatcatttgcatttggaatgtcagaggctgtcacggtgatattcgcgctgccctttgccgtcattgtcagcgacgattgtaagcctgtttccttttgaaaatcagtttggatttgaaaagctttttgatcgccggtaattgttcctgactggatttgaaactgcgctgtttcccgcttgatctgacagtatgacgctttcacccccgtctgcttcgtcaactctttagtgagcgtttttgcgtccgcttcagctgccatctcagcagtcatgacctgcatgtacggctgctttgtgcccgtcggcttgacggcgccggtcacgcccgtatctttcgtcaatttggcaagaaggtttttcgtctgctgctcgtctgatagaactcccgatgtgacggtcacatacggctgtttgcttccgcttgcgctgtaagtgccggccacacccgtctgcttcgtaaaatctttcagcacggctttcgcatcagtttcatcgtgtaagcctgatacggagatttgataagtgagcggcgcatttccggctttctttgcgtcagcctgccaccccgtatcctttttcaatttcgctgccgcttgaagcgcctcattctcagaagcaaattgctgcttcgtctccagctcataaacggaatagtcgctgtatgcggcctcagcgtgctctgtaacggtgcttgagacaaggaaaacggcggacaataacataggtgcaacgaatctctttttcattccttctcctctttctgattcaattggtttctatcaaactagtttatttatcggccggcatccttcatttttacagagagaagtcatccaattttccaaataaaaaaacttaatcccagagacgggattaagtttgaatgatttatatatgagaaacgatgattgtgcattctccggttatcgtaaagtcaggcatctgatccggcagtatgaaatgcgcgcctttttcaagctttgcggatttgccttcacagatgatggagccgctcccttctataacgctgcacagcataaacggagcgtcctgggtcatttccgccgtcccgctgatatcccatttgtatacagaaaagtattctccctgcacaaaggttttgatggtgacgccttttctcgtttcggttgattcatctaaaaatccgtccacatgagggacggtggcggcattgacggcatcgcggatatgcagatcacgcgtcccgccgttttgatctgtacgcccgtaatcatatatccggtaggcggcatctgaattctgctgcgtttcaagcacgagcgccccggcgcaaatggcatgaatggttccgctcggcacataataaaaatcgccgggtttgatcttcacgcggcgcagcaggccttcccaatcaccgctgttgatcatggtgacaagctccgctttcgaacgggccgtatgaccgtatatgatttccgcattttctttacagtcgataatgtaccagcactcagactttcccgtttcgccctgtccatgctcctctgcgtcataatcgtcagggtggactttgacggacagatgatgtttgacgtccagtattttcgtcagcagcggaaacctgtccccttccgttccgccgaataattctctatgctgatcccacagttccatcagggttttcccttgatacggaccgcttttgaccgtgctcatcccgtgcggatgggctgagatcgcccagcattcgccggttgtttctgaaggtatgccgtatccgaatcgttcgcgtaataacgtgccgccccatattttttctttacatacaggctgtaaaaaaatcggctcttgcgtcatgttcgttcccctccccttaaaaagcggctcatatcccattccccctgtatcttttttaaaacacggagggagccgcagttaaaaaacaatatgtataaatggctgacctgctcattataccattcggataaggcggaatgctcagtcatttcctgttccagaataaaatgccttgtttgtcgcaaattaaaataactgatggaaggggggaacattgtgacgataaatgctgagctcggccaaaaccttaaagcgctgaaaaaacggttcggccaaagcgatgatatgatgttttattcgtttacgtacggaaacggcaaatgtgacgcctgtcttgtgtatatagacgggctgaccgaaaatcaattgcttgccgaatatattatttctcccgtgcagacggccgcagagcatcagaaggaaccggctgaaacaccgctgtcatccatttctttcggatatcgccacacccggctttcttcacttgaggatgttgaggcagacattctttccggcaaatcggttttgctggctgaaggatggaaagaagccctttcctttgatacggaaacatttaaaatgcgggatattgaagaaccggcttcagaagtgcttgaacgggggccgagaataggctttgtcgaaaagcttcggacgaacacggcgcttttgcgtgagcagtccggtgatcccaaccttcagatcaaagagatcacactcggcgagcggacaaaaaagcggctcgccgtggcctatattcgggatatcgcgcctgattatgtcgtaaaagaagtgataaaaagactgaattccatcaccattgacgacattccggaatcaggagctatagagcagctcattgaagataacacgttttccattttcccgaccattttgacgaccgaacgtcccgaccgggtcatgggcgctcttttggaaggaagggtttccgttcttgtggacggaacgccttttacccttttgatgccggctaccgttgatgaatttatccactctcctgacgattataatcagcggtggattccggttacctttctcaggctgcttcggtatacatgcattttaatcacgatttatttacccggcctttacattgcgctcgttacgtttcacgccgggcttttaccgacgagaatggcggtgacgattgccggaagcagattgaatgtcccgttcccaccttttgttgaagcgttaatcatgatttttacgatcgagatgatcagagaagccggactcaggctgccgaagccgatcggccagacgatcggcctgatcggaggcgtggtgatcggccaggccgccgttcaggcgaacatcgtcagcgcgatgatggtaattgtcgtatccgttacggcattggcctcttttacggcgccctcctatgtgttcaattttccgctgaggctcatccgtattttttcgatgattttgtcggcgattttaggtttatacgggctgatcatgtgctatctgcttgtcatcggccatctgatgcgcctgaaaagcttcggtcaggactatatcattccgattatggcgcagccgggccaggacttaaaggatacgattgtcagactgccgacacaccttttgaaaaaacggccgaccagaaaagagacaaaagataaaatcaggcaaaggtgatccccatgaaaaaaccggaagacaagctgacttttatgcagacccttctcatggtaagcggcacaatgatcggagccggcgtgttaacactgccgcgttccgccgcatcagccgacagtccgagcggatggatcattattcttgtgcagagtgtcgtttttatcggcatcgtcctgctctttatgccgtttttgcagaagaacagcggagaaaccatttatgagctgaatcaaaggattatgggccgcgccgtcggttcgctgctgaatttgttcatgagctgttattttgtcgtcaccgtctgtttccaagcccgttttctcggtgaagtcatcaactactttttactgaaaaacacgccgatgggtgtcgtcatattcatctttctggcagtcggcatttaccatgtgacgggcggggtctatcccatttcaaagctctatgcctatctttttccgattacgatcatcattctgcttacgctgctcatattcagcctgagactgtttaatctggatttcgtccgtccggtcatggaagggggctacaaaagcttttttgagctgtttccgcggacccttctttatttttcgggacttgaagtgattctttttctggtgccgtttatgaaaaatccgaagcaggcgaaaaaggcggctgtcttcggcatcggaagcgcgggcttattttacagctttacgctgcttgtcgtgatcggctgtatgtcggtcgctgaagcaaaaacggtgacgtatccgacaatttcccttattcatgccttggaaatccagggaattttcattgaacggtttgatatttttcttttaattacgtggacatgtcagcagtttacctgcatgctcggctcttttaaaggggcgcatctcggatttaacaccattttcgggctgaaaaataaaaacaatggctggctgctgggaggattattagcggtgacattcggcctttcgatgtaccccgatgatatcaacagtgtgtttgcattcgcgaatattctcgggtatacgttttttgccgtccttatgattccttttctcacttggtttgtcagctggttgaagaaaatagccgggaggaaacagacgtcatgacactttacataaaatgggcggcggcgcttttcatactgatgatgctttcaggatgctgggacgcgaaggaagtcgaaaaggtatctttcgcccggggggtggccattgatgtaacgagtgaccgccaatataaattaacctatcaaaatctgctgccccaaagtgaaaacagccaggcttccggccggcccgtgtttgtcaatgtgacgacgcggggggataccattcttgaagcagtcagtgatgtctctttaaaagatccgcccgtttacagcgatcatttaaaagtgctgatcttcagcgacaaattgctggccgatcaaaatatactgcaaatgatgaatcactttatccgcgatgatgaattgcggcggagcagctatctcttcgcggcaagagggaaagcgtccgatattttgacggagccgacgccgaatcagcagcagcccatggccgcggaaaagctgatcgacctcacgaacaacggcggctacaacgggaaaattttaaaaccgctccgaatcgggagagcatcaatttactgccataataaagtcagctttctcattcaggccgtcagcaatcaaaaaggaaaaacggtgtatgacggagcggccataatcaaaaacaaaaaacaaaacagactggcaggatttctgtcatcatacgaaacacaaagcctgaattggctgatgggaacgatacagggcggcgtgctgcccgctatggataaaggaggacacccgattaccttcgagataaaaaaatcaacatccaaaatcaccccacggctgaaaaacggaaagttgtcatttcacgtagcggtgaaaacaaaaggcctcttgtcagaggatcaatatgccggtgaggattcattcaatcagcattatttaaacgggctggaaaagattttcgaaaaaaaactgaaaagcgatgtaaaagaagtcatcgattagctgcagaatcaatatgaaacggaccctgtattcttttctgacagagtccgcatccaatatcccgactattggaagaaagtgaagaatcattgggatgagactttctctgaagccgattttgactatgatgtttccattcagattgtcaacttcggaacgatgggacgataggcttcagcgtgttttttcgacacggaggaggatttgataaatccggctttgttcgggcagctgtgtcaccggaaattgcatcgcctgcgccatgcgtgtgatttcctgtaaaaacagctgcacccgctcatcaacgtgaacatacgtataggactgtttttttacgtcaaatgtctcttccggaaagagcgtgcgcaccgtctgcggcgtaaaaaaacgcaagtgggtgcggtcaagaatgcctgcgtctctgtatgtccagtcaccgagcagaagcgggaacagcgcttcggcgtgagaaatattcggaatgctgcatacgattgacccggcaggcgataaataagacgaatacgtttcaatgacacgccaaggatcttttaagtgctcaaggatgtccgcaaaaatgatgcaatcaaaaaagccttccggataaggcagcttcacttcttcgacatcttcttgcagaaccgcttcatagtgcccttttgccgcttgcgccgccagcgggtgcagttctattccgtacagttcacagggctgcctgttttgaagttccagtcccgtagctcccgcgccgcagccgacatcaagtatccgtttcgcatcccggggaacgagctcagcaatttccggtctcggatgggtaaagtacgtaaaatcagtgccccatttttccgtaaaccgctggcggttctccacatataattgattgatattgatatcctgattagccgtaaacgtcgcgtgtccgtgatgatgcacaaaggcatcgcgggcgatgtggaggctgtagcctttttgcagggcgcgcagacataggtcatcatcttcaaaagaaccgtatccgaattgttcatcgaacgggccgatgtcttccatgacgctttttttcaccagcaggcagaagccgacaagacggaacacccgcttcgtgttatgcttttccctttcacaataagcttctgcgaatgactccagctcatccagcgattgatacgcgtcatggatcatctgatcaccgctgacatagttgctgacgggcccgaccataccggttttttcagattgatacagcactctcagcatggcgctgagccaatttttggtgactatcgtatcgttgttcagaaacagcagattgtccccctcagccgcttcgattccttggttgcagcccttggcgaaaccgagatttttttcatttagaatgactttgacgtcaggaaggcttgatatgtagtctcttgttccgtctgatgaaccgttatcaactataatcagttctatctcttctttgtcggtgtattgatcaatgctggccagacattttttcgtcagttccagctcattatatgtaaggataataatgctcgttttcaccggcatccccgcctttatcgtgactttatactaacgtatgacatattcctgtcatttatgtggccgggcggcacgcatcagttttaaggggccggtgtatcaccgccccctcttataccggactattaaggatgaactgtctgctgttttgactctgactctgattccgagccgccgttacggcttcgcagatcctgttcgatttcttcgaggcttttcccctttgtctcggtcactttaaaccggacgaacaggaatgccagtatcccgatcacggcatatatgagaaataaatagctgattccgacggcctccattaacatcggaaaggttaatgagacaagcaatgttccggcatgcagcaccaaagtcgagacacccgtcccgataccgcggacatgcagcgggaataattccggaagcataacccacacgacaggtccccagctgaccgcaaacacgatgataaacaggcctaaacaaataaccgttgtccatgatgcggctgctgaatcttcaaagaaaagattgaccgcggccaatacgagcagactgatgaccatgcccgcatttccggccagcaacagcggcttccgcccgattttatcaataactttgatagccataagcgtcataataacattgacggcaccgattccgaccgttcccaatatagacgcagaattgccgaacccgacactggtaaatgttttcggagcataatagataattgtatttgtcccgatgaattgctgcaaaaaggcaagtccgaggccggcaatcagcgcgggtctcacccacggctcaaataattctttcaaaccgccttcgttttccttttccgcctctttcatctgatcaatctcgtcatcaatattcttcgttccccgcaatgacgaaagaatttctcttgctttatcttctttaccgatcgtaaacagccagcgcgggctttctggcatgaataagattccgatcagcagaatgactgacggcacaaccgcaagaccaagcatccagcgccaagcgcctgaatcggcaaatatataattcacgatatacgaaacgaggattccgaccgtaatcatcagctgattcagcgaagaaagcgcgccccgtttatgcttcggagccagctccgataagtaaagcggaacgatcgttgtagatgttccgacagccagtccgagaatgatccggaaaagaaccatcacctgtgtattcggtgcaaatgcgactcctaatccgcctatacaaaacagcagcgccgcccccatgatggctttccgcctgccgaaccggtcagtcagcttgccggcgaatcccgagccgagaatcgcccccgccaataacgaactgacgacaaggccttctgtgaaggcgttcagccccagttcttttttcataaataaaatagccccggaaatgactccggtatcatatccgtataaagcgccgccgagggcgccgaaaaaatagagccatttattcgagtgtatgcttttcatgttagattgactcccctcatcctgcgctgtatccgcgcggaattgttctactgcttcttttgcctgtttccgactgtttcaaaccttcgcattgttaacatccattattttactgattattttttacaaagcgacgaaacatttcccggttcctgccgtccaatataatgtgaacctgatgcaaaaataacagtagatgttgtcgaaatagagagaaagatttggaattttctcatttgcagagttgttccaagtcaacaattatggtacgcttcacaaagaatagaaacgagaggtaatgatatggaagaacgatctcaacgcagaaaaaagaaaagacgcctcagaaaatgggtgaaatttgtactggtttttgccgctttcttattggtgatcgccggttccgtcggcacctacgcatttgtgaaactgaatagtgcgaccaaagaagcgcacgtcagccttgaccgcggcgaccagtccgtgaaacggatcaaagagtttgatccgaagaaggattctttcaccgtattgcttttaggaatagacgcccgtgacaataagggcgaatcagtagatgacgcaagaagtgacgccaacgtgctcgtcaccttcaaccggaaaaagaaaacagcgacaatgctcagcatcccgcgggattcctatgtcaatatcccgggacacggctatgacaaattcgcgcacgcacatgcttacggcggttataatttaacttataaaacagtagaaaacatgcttgatattccggtagattatgtggttgagagcaactttaacgcattccgggatgtcgtcaatgaattgaacggcgttacggtaaatgtgaaaagccagaaaattgccgatcgtattaaagtcgatacaaaaggaaaagtcgtgctgaagccgggcgttcagacgcttgacggcgagcaggcattggcttatgtaagaacacgcaaagcggacaccgatctgatgcggggacaaagacagatggaagtgctgagcgccattattaacaaatctaaatcgttaagctcgatcccttcttatgacgatatcgtcgacagcttagggaaaaacttaaaaatgaacttatctcttaatgatgccatcggcctgtttccgtttatcacatcgctgaaaaaagtggattctttgcagctgacaggttcagacagctatatttacactcctcagtacggcaaaaatatttattacttcaagctgaatgaggagaagcttcaagaagtgaaagcgacattaaaaaaagatttagacgagtaagatgtcacggcggggtttcagcaaaccccgccgtttttctgttgaaaaaaaggacatgaaggtatagccttttaactgacggctttctgtgctgatttcacaaaaagctgaacatactacatgaagcagctttatttttaaggagggcatccatacatatgaaattgatagccattgacttagacggcacattactgaactcggaaagtgtgatttctccggaaaacagagcggctttacaaagagcggatgaatcgggcattcttgtggccatctgtacgggcagagccacttttgacgttaaggcgctcttaaaagatttggatattccgatcattgcggcaaacggcgggacagttcacgacaaaggataccgcctcatcagccggttcttaatggatcagcaggccggtaaggatatcgccgcttatttaacgggaaacgatatttactttgaggtttatacggatgatcatctcttgtctccgtttgacggcgagtccaaactgcaggcggaactggacattctgaaaagcgccaatcctgaggaagatattcagacattgtgggagggcgcaaagacgcagttcaaacaattcggcattaaacccgtgcaggatatacaggcgatttttgacggagacgaacatatttacaagctcctttgtttctcttttgatatggaaaaactgaaaaacgccaaagaagaaattacacatcacccgaaattatcccagacttcttccggaaaacacattatcgaaatcctccctgccggttccggaaagggacgggctctgagggagcttgcttcactgtacggaatagaaaaacaggatatttacgccatcggcgacagcccgaatgacttctccatgtttgaagcggccggaaaccgcatcgccatgggcaatgcgattgatgaactgaaagaaaaaagcacatatattacaaaaagcaatgatgaaaacggtgttgcctatttcatcaaccggcttctcgacaatgaacaataaaaaatctgtccggcaaaagccaggtcttccacgacctggcttttcatgtttccaaaaaggagtttcatgatgtcgaatgcaatcgctattattggattttcagcttttctcttcgcacttggatacggaatattccatctcatatgcaaagcagtaaaaaaagaaaaacgtttttcaaaaaagctgttttgcccccttctcatcggcgggtttatcctgttcttaatcggaggctcctcggcagagccggacacagcggccgtgaaagcggaggagaaatacagcacccttgatacggctaatcaaaaattgacgaaggaacatcaggcgcttgagaaaaaatatgaaagcatcagcgccgcggccgaaaaggaaaaatccgaggccgaagcaggcaatgaagaaaaactcagcaaactcagcaaagaaataaatgagctgaaaaaaacaaacaaatcactcaaacaagacaatgagaaattaaaagattcacaaaagaaactcgaaaaggccgctgaaacgcttcagtcagaaaataaaacattaaagcggcaaaaggaagaaacaaaaacagccggaaacgctgaatcggcgcaaaacacagcctcttcctccggcgggcatgcagaaacgaaggcagccgacacctcacagggatgcaacattaaaggcagccgaaacggcatttatcacacgccgggaagtacatactacgatcggacgacagatccagtagaaatgttctgttctgtagaggaagcggaagcggcgggattcagagcgccgaaacggtaaatagaaaaagacgtcagagatactctctgacgtctttttttacggaagccggatgctgcccgcatacttgtccttccaataagcgcttgtattcatatttgttatggtcacgcctgcggacagagtgacatgaataacttgtccgttcccgatatagatggccgggttcaggctttcggctttaaaaaagaccagatcgcccggcttcaaatcctgtttactgaccggagcgcccgcctgcatctgcttctccgcgtaacgcggcaggctgattccttttgctttttgatagacgtattgaacaaatcccgccgtatcgaagcctgtatccggtgaagcgccgcctttcagataagaaattccgatataatcagccgctgttgacaccacgggattatctttggaaatggccagattgctgaatcggcgcacccctgtataatgttttttccaataatcttccgataagtaggaaatggtcacttttgcagagcggctcgcttggatgaatcttccctctcccgcataaatgcccgcatgggaaattccttttttatacgtgtcgctgaaataaatcacgtccccgggctttatgctgctcagttttattttctcaccgaccagccactgctgttccgcagatctcggcaggtaaatgtgaagcttgttttcaaaaacatattggacaagccctgaacagtcgaatccctcttcaggtgtgcttccgccgaatacatacggaatgtcgagataacgggcggcctcctgaacgatcggattatcagccagctccggatcttttgtaatccgctttgcgccaagatataaattcatccaataattgcttttttgaaagcttgtgacggttacgcctgctgacggagaactgtgtatcatctctccatttccgatataaaggccgtcttggacgggcgcggtttgtaatgaatccgactttttgaaaaaaacaatatcccccggtaaaagctcattttctttgatggcagctccgactttccattgatcactgaccgttctcggcaggtggatgttctgcctgctgaaaagatactgcatcaatccggacggatcaaaaccgtccttaggctcgtcgcctccgtaaacatatttatttccgacaagtttttgcgcgtctgaaaccatcagggcagaaacttgagaatccgcttcagcaatttccgttctcgttactgcaggtgccacaagacaaatcataaggccggcaaggatgtacttcctccagcttgtgagcatgttttctgttcactctccttatttttactagttcttacatcggtaactttaagtaaatgtttaggagagcataaaaaaagaatgcccgatacgggcattctttactggattcggtacaaaaaatatgccggcaagcgggaagcatgcgcttattttgcgcccgctgtgtcctcctgctgaattttttgcatttctgtgtcaattttttgtttttcctgatctgtgagctgatcattgaatttaaaagctgacataaacataaataccataatgattgcggcaaacggccatcctgctttaatgattttcatttgtttttcactccgctttcttttttaagatatcgctgtgatccacatcaaacgttaattttccgtccttgacgctccacttgaaattcgattctttcgtcagttcacgtatgattgttttatgattgatgctgccttttttaaccggcgcaggcgttgcttcgtgaatgttcatcggcgtgacttcaaagcgtcccgtaccgtttttctgcaggtgatattgaacaagcgccgtgtctctcgttcttgtccatccctggtcaaatacgaagttgcccaggctgtagaaaataacagtgccgtggtacatttcgatcggttcaagcacgtgcggatggtgtccgacgataatatccgctccggcatctgacattgctcttgctaattggcgctgtctgtcattcggatcattatcgtattcctgtccccagtgtgtttgaacaataacaaggtctgcattctttttggctttagagatcatcgggataaacagctcaggatcggccggaagcacacccggcgcatttcgtttagctgcaaagcctttcccggaaacatcggtgaatcctaacgttgcgattttgactccgtttacatcttgatatgaaatgttctcctcggcttctttaagcgtcaggcccgcaccgacaagttcaaggttctgctttgaaaattcttcaaccgtatcccgcattccttgagggccgtaatccatcgcatggttgttagctgccgtcaaaacggtgaaattcatgtccttcagtacttttacggcatctttgtttgattgaaggtggatatttttttctgcttctttgtagttctttttatatgtaaccgggttttcaaagttccccgacacataatcggatgcttcgaagaatggctttgcgtagcggaagacactttccgttccgttatgctttgtcactttctccacattccggcccatcataatatctccgacgaatgaggctgacacaaggtcatcggcatttctttttacactcggcgtctccgccttacctgtcaggatgcagacgaacatcaggcaaaagacgatcggcagtgcgataaaaacgtgaagattggtcttctttttctgctgtttggtcagcttcagcagtttttcttgaaaggttaattgttttttcatcgtttgacacaccttacattagattaagtagtaagcaaacataatggcaaaagtcgcgccgcttaagaacagcgtgctggcaaatgtaatcgttaatccctgtttctgaatggtgttggcgatcagacccggtacaatgataccgattccgcggaattctgatatctcaaacggtacgatcgggtaaagaaaatcaagtgcgatttttaagcagattcccgtaatcagcattgctgcgaattttctgcgtccgtacaaaatcataaatctggataaaccgtatttgacgatgacgtatgtaagaagactcactaacagcacgagcaaaataaagaccggctggttaaaaacgagtcctaaataacccggtacgactaaaccggctggtacgatacctgttttttccgcaaaaattaaactgattaacacgcctaaaataagtgagatatataaatctgatccgaacatttatccttttcctcctagctaacgagctgtttcaccttatactcttggattttttcaattaatggttccgctgaaccgtggatattgccgacgccatatatgacacggttttgcattcttgttttcagcacgtccatgatttcgtctgttgatttatattccagatcgtgcagtgtatcagcaggaatcttgccttcttcataagctctgacgatcggttctgttgtctcgccgatgagaatgagttccttcgttttaatgtacggaagcacgtcgttggcaaactgaatcgttctgtccacgcggtcggcgcggcagttcatgataacaatcggttcatctgtcgggtagccgatttcctttacacgtttccatatatttaaagtagaagatgcatcatttgcggcaaagccgtttacgaaatgaccgggctccttcgtgctgagcagcgggagaattctcatggcgccaggatcaggcggcgcattcagcattcctttaaacgctgtttcttcatctatgccaagagcttgggcaacgccgagcgcaagggaagcgttatcaggaaagaccatatattcgaatttccgcaggtattcatcagtaattttagagttatccgcaataataacttcggtattccgctctgcggctttttctttaaagaaatctgtgtattcactgtctgtaatcacaagatggccgttatatggaatcgtcgcggtaaatgcttcagcaatttcatcaagcgtcggccccataacgtccatatggtcttcaagcacattcacgatgacgccgatgttggcttgaagcagttcttcctgaaagataatctgataatccgggtttaccgccatacattcactgacaatggcattggcgccccgttctacggtttccttcattacctctttttgctcgccgatattcgggccctgcggtttccgtttgatcggtttctcctcaggtgtatcccaatagatcatccttgcatctgttcccgtcgtttttccgactgttttgtagcccgcctccatcagtattccggtcgtcagcctcgttacggttgacttgccgcggataccattaatattgacgcgtactggcagagcatcgatattcttctgatgccgccttttttcaatgattccgatgattagtacggcagcacaggctataatgagtaaccacattgatttttgacatctccttctgtattgataaattcattcatcagtatatagcttcactatgaattctcaatcggcattatgtaacataatctcctcgcctgcactaagccaaacttctctattagcggcgctattcttcctattatcgaattgctttttttgggaataggcaggacttcgaacttacttcaatttttttcgagaaaaatgaatgcgtttacatttgcctgcggatattcgtttggactaaatggactatttgcgttccggaagaaaaagatgcaatcataatccatcttttcacagcccgttatatcagcattttccgcactgcgcatacgattcgggactctccgtccgctggatgcagactgccttttttgttaaggataaggtcataaagtcattcattttcccccatatcctgctgtcagtcctattccaaaataactatcggaatgacttgcacatgacagaaacagacgggtccggagtgtttacaggaaatacacaatttatatgcggaaagtctatttgcttttgttccgtatacaggacatttatcactcttttgaaataattttaataaatctttatattcgttcaagaaatgttcatccatatttgtgaagttcttggtaaaacatcaagcatcatcaataaattcctctattttataaaatgcataaaaaaggaatagccgctgaaaactacagataacgcggaaaggaggcggtctgatgtctgcggatatacaaaacaaacggcttcccggtgattttgaatcggctgtacgaaaaatgcaggaactgatgtgtgtttgcggtgattttaaaatacgaaggatcaaactgcaggatcgtcaaaccgcttttttttatattgaacaaatgatagaagaacagaagctgaatgagtttctgttaagcgacagcttgcagaacggctcacttgaggaagcgatggatgctgtcagcagtgcggaaacggatgagatcagaaaaattatcgacgggattttggccggacaggttgtttttctcagcgatgcgtcaagtaaggcgaagctgttctctgtcgggcagaatccgctgcgttccattatggaaccagaatctgaaagcatcgtccgcggggcccatgacgggtttgtggaaagtttggaaacgaacattcatcagctgcggtttcacatacaggaccgccacctctccgttcattatatggatatcggaaaacgggccaaatcaaaggttgcagtcatttttgttgagaatatcgccaatccggagattgtggaggaagtgaagcggcgcctttcgtacctgcgtatcgacagtgtgcttgcgcccggaattatcgaggagtcgatagaagataattcgttttccatatttccgcagatcgttcatacggagcggccggataaagcaaaagcaagcgtgatggaaggctgtgtcctcatcatgatggatgggagcccgtcagccttaattgcgccgatcacgttcttttcattttttcaatcgccggatgactacagcacaaggtggatttccgccagttttttgagggtgctgagatttttcgcctttatgatcgcgattacgctgcccgctttttatattgcgctgattgcgttccattttgaagtcattcccaacgatctgattattaccatgaaaaattcgattgttgatattcccttccctccgctgatagaagccatgattatggagattacgattgaactgatccgcgaagccggtatcaggctcccgaaaccgatcagtcagacgatcggcattgtcggcggtctcgtgatcggtgacgcagtcgttcaggcgggactcatttcaaatatgatgattatcgtcgtagccgttacggctgtttcctcttttgtgcttccttcatatgaaatgagcacgtccattcgaacgctcagatttccgcttatgtttctggcatcatcgttcggttttatcggtatcgggctcggcttcgggcttatcctgatgaacctgtgcaagcttgaatctctcggggttccttatctatcatctctgacgccgtttcatttcagtgacttaaaggatgcgtttatccggcttccggcttggttcattaaaagaaggccgttttatttgaggccgcaagactcaaagcagattaaacatgttcgggggtggagaaaagatgaagactaaaaaaatcagccggcttcaagcagtatttttcattaatcagacgcagatcagcatcggcattttggcgctgccccacttgctgatgatgaaatcgggaagcagcgggtggatttccattctgctcaccggactgcttgtccagctaacattcagtctgtatatgatattatttcaccggtttccgaagatgaatctgtacgaaatgctggaggaggtgttcggaacattcgccggcaaagggctgcaagtgctgtatattttatattttacgtttctctgcacgctcattctttctgtatttacacggattttggatatctgggtgctccctctgactccgaattgggtcatctgcttaatgctgatactcggttctgtctatatcgcccaagccccgctgaatgctatcgccaggttcagctttatcttaacgccatttttgctgctgatctctctgccgcttttatacacgctgggaaaagctgatgtgacaaacattatgccgatttttcacggaaccgccaaagacatgctgaccggggtgcagcagacactggtcagcattaccggctttcaggcggcgcttgtaatcgggccccttatcaactgcaccgtcagccagcgctacaaaataatgacgatttcaaacgtctgtattgtcctttactatctgtacatcacccttacttgctttgtcacaatcagccccgaagaaataaagattatcccggagcctgtgctgtatttgttaaaaaccgtttcattcagaattatcgaacggacggatctgctctttttgacgttttggttcgtgaccgtcttttcaacattggccaacgtgttttatttggcaagcaccggaatggccaagctgttcaacaaaaaagatcacagccggtttgtttatctgctggccctgctcgtctttcttccatctatttgggccataagcacggataaaacgatacagcagctggatcaggttttccgtctttccgatattgtctttgtgtatttgtttccggcgtttatgacattgattgtccttgtacgcaaaaagggtgtccgccatgcgcattaaaaaagcgcttcttatcagtctcatgtgtgcaagccttacgcttacgggctgctgggaccaaaatttatttaaagatatttctctcgtgctgaccgcaagcctcgacgtggatcaagacggtaaaaataaaatcggcatcacctatcggaaggttcaatcctctcaggcggaacaggaaacaggcggctccttcattacgacggtgctcagcgcttcagggcacaccatccgtgaagcgcggttccaattggataagcttgttgatcagcgcattgacacgtccaagcaaagagtcttattaatcggtgagaaaatggctgaaaaaccgctttttccatatctcgatgtattttacagggatccgaaaagtccgcttctcgctcatccggcggttgtaaaggacggcgaggcgattgaagtgctgaagctgatcgtccggcagaaattgatcgtcagcaagtatttaacgaatttattaacaagcgcctatacggaatcaaatatcagcatggaaaatttgcaatccatccgttcaagcatgctgacggctaatgaggatttcgctcttccttatttatcgattaacggacagaccataaaggtagagggttcagccctgttcagcggtcagcggaaagtcactgaggtgctcggtcaggattcgacccttctgactcttttaagcgggcaatttaataaatcggccaatattaatctgaagctgtgggacaaatacaaaatggatattgaaaattacatttctctcggcatcacggatacctcgagaaagattgtatttttagatacagatcctcagcatttgaaagtgaaaattcgtttaaacctgaatgcacgtgtcttggagtatccgaaggacaaactgagttcttatacggctatcggccaaattaacaaacaagcttcagccaatctgaatgaacaggccagatcggtgatcaggcatattcaagagcataactcggatattttcggcatcggccggagataccaaacccattattatgagcggggcaagcatctcaattggcgtgagatctacccttccattgagattgttcctgatatcaaagtgaatatctcacaaatcggtatcgtgaattaaaggaggccccggcctctttttttgttgccaatcgaaattattcgtggtaccctttctatgtaaacggttacataaatgaaggaggagtgtttgttggcaacgattaaagatgtcgcaggcgctgccggcgtctctgttgccacggtctcgcgtgtcctcaatgacaatggctacgtgcatgaagatacaagaacaaaggtcatgctggccatggagaagctgaattattatccgaatgaagttgcccgttctcttaataaaagagaatccagactggtcgggcttttgcttccggatatcacgaatccctttttcccgcagcttgcccgcggcgctgaagacgaattgcagcgggaaggataccggctgatcatcggcaacagcgatgaagaattggaaaaagaactcgattatctgcaaacatttaaacaaaatcaagttgccggtattttggcagccaccaattatcccgaccttcccgaatacagcggcagcctttacccggtcgtatttctggaccggacaaaagaaggcgccccgtccgtattcagtgacggacgggcaggcggaaaacgagcggctgaagaaatgctccgcggccaaagcacaagcatcacgcttgtcaaaggccccggccaccttcaaaccgctcaggaacgttttaacggcgcacttgatgtgctgcaaaaagccggcgctcagttcaatgtcatctccgccgcttcattttccatcaaggatgcggccattttagcagaagaattgtttgccgcatacccggaaaccgacggcgtcatcgccagcaacgatattgcggcggccgccgtactccatgaggcgctgcggctcggtaaaaaagttccggaggagattcagattatcggatatgacgatattccgcagagcgggcttttattcccgcccctttcaaccattcgccagcctgcatatgagatgggaaaacgagcggcaaacctgctgctgcaattgataaagaaagaaccgccgaaagagacggccatacaaatgcccgtgacatacataaaaagacaaacgacgagaaaggatgatcaccgtgagtgaaatttgtgttatcggaagctgttctatggatcttgtcgtcacatctgaacgacgtccgaaagcgggagaaaccgtactgggcgcagactttcaaaccgtgcccggaggaaaaggcgccaatcaggccgtagcagcttcccgcctgggcgcaaacgtatacatggtaggaaaagtgggcagtgacagctacggaaaagcgattattgaaaatctgcaggcaaacggtgtcaatacggactatatggaaacgattacacataaaaaaagcggaacggctcatattgtgctcgcagaaggagataacagcatcgtcgtcgtaaaaggcgcaaacgatgacatctcccccgcttatgcaaaaacagcgctcgcgaaacttcccggcattgacattgtgctgatccagcaggagatccctgaagaaaccgttgaagaagtgtgcagctactgccgcgcgcatcaaattccggttatcctgaatccggcgccggcccgcccgctgaaacaatcaaccattgagaatgccgcttatcttacgccgaacgaacatgaagcatccattttatttcctgatcggacgaaagaagaagcgctcgccggctatcccggcaaattgtttattaccgaaggaaaacaaggcgttcggtactcagacggcaccgcggaacggctcgttcccgccttccctgttgaagcggtcgacacgacgggagccggcgatacctttaatgcggcatttgccgtcgcactcgcggaaggacaggacatcgaacaagcgcttctgtttgccaaccgtgccgcctccctgtccgtgcagcacttcggcgcccaaggcggcatgcctgccagaaaagaagtcgaggagctgctgtcatgaagaaacacggaatgttaaacagccacattgccaaagtattagccgatctcgggcatacagacctcatcgcgatcgctgatgcgggtctccccgtccctgatggtgtccctaaaattgatttgtccctaatggcgggcgttcccgcctttcgggacgtcaccaaactggtcgccggagaaatggcagtcgaaaaggtggttgccgcctctgaaatcaaagacgcaaatcctgagaatacaagatttatagaaaaccatttctcagagcagacgatcgaatacatgtcccatgaagaatttaaacggctcacacggaaagcaaaagccgtcatccgaacgggtgaaatgacgccatacgccaactgcatcctgcaggcgggcgtgattttttagaaagaagggatccagcatgcacatcggcatgacagacattcataaagccttcgggaaaaaccaagtgctctccggcgtctcatttgagcttctgccgggagaaatccacgctttaatgggagaaaacggagcgggcaaatcgactttaatgaatctgctcaccgggctgcaccggcttgacaaaggaaatattacgataaacggaacaaatatgagcttctccaatccgaaagaagccgaaaaacacggaatcgcctttatccatcaggagctgaatatatggccggacatgacggtgcttgaaaacctctttatcggtaaagagctgacgacggcattcggtgttttggaaacgaagaaaatgaaagcgctagcaaaatcacagcttgaaaaactgggtgtctcgctccctcttgatcgggaagccggacaatgttccgtcggacagcagcagatgattgagattgccaaagcgctgatgacaaacgccgaagtcattattatggacgaaccgaccgcagcgctgaccgaacgggaaatcagcaagctgtttgaagtgatgacggcgttaaagcaggacggcgtatcaatcgtctatatatcgcaccgaatggaagaaattttttcaatttgcgaccggatcaccattatgcgggacggccttactgtcgacacggcgcatattaaagacaccaattttgatgaagtggtcaaaaaaatggtcgggcgggagctgaccgatcgatatccgacacgtacaccgtcactcggcgataaggtgctcgaagtgaaaaacgcctcaaaaaaaggaagcttttcacaggtcagtttccatgtgcgcgccggagaaatcctcggcgtttccggcttaatgggtgccggacggacagaaatcatgagggcgctgttcggaattgaccggctcgattccggagagatccggatttccggccgaaaaaccgacattcggaatccatatgatgccatccgcaagggactgggtctgattacagaaaaccgcaaagatgaagggctgctgctggatacgtccattcgtgaaaacatctcattgccgaacctgaccagtttctctccgaaaggcatcattgaccgaaaacgcgaggcggagttcgttgaattgctcatcaaacggctgacgattaaaaccgcttctccggaaatcgcggcgcggcacttatcaggaggaaatcagcaaaaagtcgtcatcgccaagtggatcggtatcggcccaaaagttctcatcctcgatgaaccgacaaggggcgtcgatgtaggcgcgaaacgggaaatctattcattaatgaatgaactgaccgatcgcggagtcgccatcatcatggtttcttccgagctgccggaaattctcggcatgagtgacagaatcatcgtcgtccatgaaggccgcttcaatggagaaatcaatgcggccggcgcaacacaagaacacatcatgacacttgccacgggagggcagcagaatgaaaactgaaccaatgacaccaactgaacaaaagcgtttttccattcataccttcacgcaaaaactcggtccgtttctcggcttactgattcttgtgttgatcgtttctgttttaaacccgagttttcttgaaccgctcaatattctcaaccttcttcggcaggttgcgattaacgcactgatcgcattcggaatgacatttgtcattttaacgggcggcattgatctctctgtcggagccatcctcgccttatctagcgcattagtcgccggtatgatggtatcaggcattgacccgatcttagccgtcatcctcggctgcgcgatcggcgccgtactcggtatgatcaacggtttcttaataacaaaagggaaaatggcgccgttcatcgccactttagcgacaatgaccgtctttcggggactgactctcgtctatacggacggaaatccgattacgggactcggtacaaactacgcttttcaattattcgggcgcgggtattttctcggcatccccgtccccgccattacgatgctgattgcatttctggccctgtggattcttctccacaaaacaccgttcggccgccggacatacgccatcggcggcaatgagaaagcggcgctgatatcgggaatcaaagtaccccgtatcaagatcatgatctattctctgacaggtttattatcggcgctagcgggagcgattctgacatcacgcctaaattccgcacagccgacggccggggaatcatacgagctggacgccatcgcagcggtcgttctcggcggaacgagtttgtccggcggacgggggcgcatcatcggaacgctgatcggggttttgattatcggaacgctgaacaacggtttgaaccttctcggcgtatcatctttttatcagctcgtcgtcaaaggaatcgtcattttaatcgcggtgctgctggaccgcaaaaaatcggcatagtaggaggatcattatgaagaaagccatcatcgcgattgcggcattatcactgtttttgctgtccgcctgttcacttgaaccgccccaatgggcaaagccgtcaaacgcaaaacataaaaaagaatttacaatcggactgtccgtctccactttgaataacccattcttcgtttcattaaaagaaggcgttgtaaaggaagccaaaaaacggggcatgaaggtcattattgtcgatgctcaaaatgattcatcaaaacagtcgaatgacgtagaagatctgatccagcagggcgtcgatgcactgctgatcaatccgaccgactcatcagcgatttcaaccgccgtcgaatcggcaaattccctcggcattcctgtcattgcgcttgatcgttcagccgaacacggcaaagtcgaaacgcttgtcgcctctgacaatgtcaaaggaggagagatggcggccggctacctcgccgaccagctcggaaaaggcgccaaggtggctgaattgcaaggggttccgggtgcatcggcgacccgggaacgcggaacgggctttcatcatattgccgacaaaaagctggatgtcgtaacgaaacaagcggcggattttgaccgcacaaaaggattaaccgtcatggaaaacctgcttcagggccatcctgacatcaaagccgtgttcgcccataacgatgaaatggcgctcggtgcgctcgaagcgatcaacagctcaggcaaacacattctggtcgtcggttttgacggaaataaggatgcgatttcttccattaaaaacgggaagctgacagccacggtcgcccagcagccggaactgatcggaaaactggcggcggaagcggcggaacaggtgctaaaaggagaaaaaatcaaaaaaaccatttccgctccattgaaacttcaaacgcaaaagtaaccgtccgatgtttatacttccggaaaaacgtgaaaaggagaagtaaaaggagagatagagatgaagaaaacagccaaagcggcatccatcctgactcttgcagcgggaatatcagcggcttccgctgccgggataacgcctcttcccgagacacatgcgcaagaagcggtcaagattgacgatctgtacagctatccgcttgactcttatctcgtttccgcggaagcattgaacgtcagaacaaaagcatcagcagccagtccgaaagctgatatccttcatttaggcgacagcttaaaggttgtttcattcccgagcgctgactgggcaaaagttcattataagaacggaaaaacaggatttgtatctactcattatattgttaaagaagcaacaaccgtaaaaacaacggcaaaaacaaaagtatttacagaaaaacaagcggtcaaagcttcccttgctaaaaatacgagcgtttctttcttaggctggaaaaagacagccggcggcggcattgatttcggctgggcgcttgtcgattacggcggcgcaacgggatatatcagcacaaaagatctgcaaaaactgacataatatcaaaacggatttcgcaaattcagcgcgaaatccgtttttttctttctgacagtcaaaaatgtcggggattcgaaatatttctcaggaaatattgtcggatgaaaacgaatcggcggctcattttaaaatgatttctttatgtaagcagccagacgtttggcattgtcatgaatatccgtcgcatccgccccatttacaccgtacagcgcgaaagccggcaaataggtcatacctgtaaaattagccattgcctgaaacggccttaacagctcgctcaatgtaaagtggtttgaccctcctgcctggtatgcatcctctccggcacctacggaaacagccagcatcaattctttgccatgcagcgcctttcctttggagccgtaggcccagccgtacgacagcacatgatccatccatgtttttaaaagcggaggcgcactgtaccaatacagcggaaattgaaatacgatccggtcatactgttcacacagctgacgttccttttccgcatcgatttgcccgtccggatattctttataaagctcacggaccgtgagttcatcatgtttttttaattcttctgcccatgccttattgaccgctgagttctccatgtcagggtgaaccgctaataccaatactttcacagctatcacacctttcccttttgactgtattttacctaatcattgccgattcagccaaataaaaagaaagccccgaagaaaaatgggctttcttttttcatttattcagggcttccttcggttgtttcaatatccttcgcgaaattaggattatctaaatttgcgttgaaaaagtccgccgtattcggaagcttgaggttcatgttcattttttgagaaatggtcactttgcaatctttaatgacatagtcaaacacatgcccgccggaattgcgcccttcatcaatgaagtgcaggtgatatccggaaacggcgatgccgtttgcgtaacccggtgtccagaagccggcgatcgttccctgaatgtcgtcaaagttgaacacaggctgtgttttcaccgcttcgatcatcggaacgtacggtttctcctgacgctctaccgttctggtctgcacctttttaaatacgccgtctaaacggatcgcataaaataagtttttactaggcagaaggctggcgatttcctgctcaaattcttcacgggtcatttcgccgtcgatcgtatgcgtcatatccggcgtgaaaaatgtgaatgagcagaatggtgacaggtctccgcttttgacaggcgtagccgttccgtcgccgcgcagacggtaaaattgtccgtcaaacccgattaattcgccgtccagtttgttgaaagtgccgattccgaaatcaccgaacttcggaatgtcagccatatcaaaatctccgtcatatactccgtccagcagagatgtcatagttgatacttgataaacctgatcctcaggtgagcctttgtctccgcggcccatcatttggatgtcacttgcatttttcatattcccttcactccttttaaattgggctgttttagaaaacagatcatggtgcgcagagtgctagagagcttttgctttcattttttctttgaattgcttcggaagcatgtcgcttgataaatggacgttgtcactgtaatcgacaggaatgtcgatgatgacagggccctctgtgttcaagcctttttgcagcacgtctgccagctgttccggtgactcaacgcgcaagccggtggcgccgaagctttctgcatattttacgatgtcaatgtttccgaaatctacgcatgatgtacggttatattttttcatttgctggaatgcgaccatatcatatgtgctgtcattccagacaaggtgaacgatcggcgattttaagcggaccgccgtttccagttccattgccgagaacaggaatcctccgtctcctgaaacggatacgactttttcacccggattcaccaatgtggcggcaatcgcccaaggaagcgctacgcccaatgtctgcatgccgttgctgatcatcagcttaagcggctcataagcgcggaagtaacgggacatccagatggcgtgagagccgatgtcacaagtaacggtcacatcgtcagcaattgcgctgcgaagttcttggacgatttgcaaaggatgcactctgtcggatttatggtcgcttggagccttctcgctgtcagagagtatttgttttaattcgttcagcacttcacgttcacggctgcccatatcaaatctcaccgcgtcgtgctcaatttgtttgaccgttgcggcgatatcgcccagtaattctaattccggctgatacgcatgatcgatatcggcctgaatttcgtcaagatggataatgtcacggtcgccgtttacattccagaacttcggatcgtattcaatcggatcgtaaccgatcgttaatacgacatccgcctgttcaagcagaagatcacccggctgattgcggaacagtccgatccggccgaaatattggtcttccagctctctggacaatgtgccggccccttggtacgtttccacgaaaggcagttttgttttagcaagcagtttgcggatttgttttaccgcctccggtcttccgcctttcatgccgactaacagaacgggaagtttcgccgtctggattttcgcgatagccgcactgaccgcttcttccggtgcagggccttgtttcggcaccggcacgctgcgtacatttttcacagttgtgatttcattcacaacatcctgcggaaagctcacaaaagccgcgccggcctgacctgctgacgctgccctgaaggcgtttgttaccgcttctggtatattccctgtttcctgtacttctacactgtattttgtgatcggctgaaatagcgccgcattgtccaatgattggtgtgtccgttttaaccggtctgcgcgaatcacgtttcccgccagtgcaactaccggatcaccttctgtattagccgttaacaagccggtcgccaagttggatgcccccgggcctgaagtaacgagacaaacgccaggttttcctgtcagtcttccgacagccgctgccataaacgcagcgttctgttcgtgacggcataaaaccagttcaggtcctttatcttttaacgcatcaaatactgcatcaatttttgcacccggaatgccaaaaacatgtgtgacaccttgctccactaagcaatcaacaacaagctccgccccgcgatttttaccagaggtttttagttcatttgttgcttttgccaacaccctcactccttattatgcatattaaatataaaattttaagtaatttgtgatattattcactatacactctttggaaattgacctccaatatcaattcgccgtatgattaatatgtttcacgaataattaacaaagggaaaggaatggataaggatggagcttcgccatcttcaatactttattgccgttgccgaagaacttcatttcggcaaagctgcgcttcggttaaatatgacacagcctcctctcagccagcagatcaaacagcttgagaaggaagtcggcgtgactttattaaagcgcacgaaacgggttgtagagctttcagctgccggagaaagttttttaaaacacagcagaaacgcgatcgaacaaattgacaaagcgattgaaatggcgcagaggaccgcacggggagagctcggccgccttgtcgtcggttttgtcggctcggccacatatgaatttctgccgccgatcattcgggaattccgtgaaaagttcccttccgtcaaactggatctgcgtgaaatttcctctttcagacagcaggaagagcttctgaagggaaacattgatatcggcatccttcatccgcctttacagcattcggctttacatatggaaaaggtgcagagcagtccttgcattctggctttgccgaagcagcacccgcttaccgccaaacagacaatcgatattcaggatttaaagaaccaaccgattatcacacttgcgaaagaaacatggccgactttatacctggaatttgtaaacttttgcgagcaggcgggcttcaaaccgaaaatcgttcaggaagcgacggagtatcaaatggtgatcgggttggtaagcgccggaatcggtgtgaccttcgtaccttcttcagctaaaaagctgtttaatctcgaagtcgcctatcgcgacatcaatcaggttcagcttaccgccgaatgggtcatcgcctaccgaaaggacaatcaaaacccgatcctgaaacatttcttggagattatgaataaacgccaggctttattgcaggcggataaggaaaatgcataaaaaaagagggcgccgaaaagcagcctctttttttgtgtgcttatatggaattttattaaattagtagaaacgctcagtacacctttcgtcctgtactcgtatacatacagtacaactgatcaggagggataaaaataacggggcggcaatggcccattcaaaaaggaggcagaacacattacacatattagcgtcattttgaccctgatttctttctttgcgactattatttttatattttggagacccggggaataaatgaagccgttccggcagcgctgggcgccattctcgtattgttaagcggaaccgtttcctttcatgatttaggagatatagggtcaaaagtcaccggagcatccataaccattatctccacaatgattatggcgatcgcgctggaaagcttcggttttttcaattgggcggcagccaagctgctccatcgcgccagagggtcaggcatccggcttttttggttaaccaacctgctttgtttttcaatgacgctctttctgaataatgacggcagcgttttaattaccacccctattttactattggtattacagtatctcggacttaaaagacatcaaaaaacgccgtatttaataagcggtgtattaatcgcaacggcagcaagcaccccgatcggcgtcagtaatatcgtcaatttaatttctctcaaaatgataggcatggatctttatttatacaccaatatgatgtttatccccggtacgctgggactggtgtttatggcctttctgctgtttgctgttttttaccgccgcttgccgaagcagctccccgatattccggttcattttgattcgctggaacacaaaagatatcatccgcttcagcctccgccggacctgacccaaaacagccgcacaaacatcatgttttgtgttttggcatttgtattgttagtacggatcagtctgtttgcagcttcttacatcgggatatccgtttcgcttgtggcagtcatcagttcagtcattctgcttggctggagatggttttatttaaaaatcagtccggcagacttattaagaaaagcgccctggcatatctttgtttttgccttcacgatgtatattatcatctacggccttcataatatcggactgaccgcattgcttgtgcagtatattgagccttatgtctcacaaagcatcgcccacgcagcatctattatgggaattgctacatccgtcctctccaatttgttcaataaccatcctgccttaatgatcagcaccttgacattaactgaaatgtcaatcgaccctttaaccgttaaaatcatttatttggctaatattatcggcagtgatatcggatcattgcttctgccgatcgggacattagccacacttatctggatgcatatcaccagacagcacggcgaaaaagtctcttggtcggaatatataaaaacgactattatcgttgtccctctcaccgttgtgtttaccattaccgttttatttgtttggatcagttggatttatctttagctccgatgaaaaaaactgcctgctgtataagaaggcagttttatctttatgggaggtgcatggtttttaaatgattcaatttccaaaaaacagtatctccctctgcattggtcaattcaaggatattagccgagacgtcctgtaacaatcccactttattcggtatatctcctaagtccagaataatcaatttgccgatatatttttttaattgctcctcaaaattccggacaaggggcacattagcgggaacaaccggaagctctgagctgtttaatgtatacggcgtctgctcattggagtagggtgtcagccatttcaaatgattcatcgaaatgaaaagcgtcttataaaccggagagaagaaaacgaaataatcgtttagaacacttgtcacatacccatgaatggaacggtctcctgtcacgaatatttctgtaaatctgccttttatatgctggagggtatttcgataagaaaatgaatgttcctgtttttcaggatgcggactttctattcttgtgcacgccccttgattctgatcgtccggccgcgtcaaagtcatccgctgcagatgcagcagcgggatataaagaaaagtccggccgtcataaatcacaatgatatcatgaccgatatccaaaagagttcctgaaaatgttgtatttcccgatatttcaatatcgacttgtttatcaagaaatctgcttaatccagccatttcatcccccctctcccgcgtttacggacaatctttccggtcacttacggccgcgtttccaccgataatctattgttcttaatacagtggcgtaactataagattcatcttcatcccgttttgaggatcgatcctcttttgatgatcttttcgatttttcagaggaagtatgctgctcctcatgtgattcctcttcagcacactctttctcaccttgattctcgtctttattctcctcttttttagctgctccttttgcccccgcgctgatactcttgatatgaagcggatggattcgcagcacttctttatctttcacaagagtatagtggccgtcggaattatccacaagtataccttcaacggcttcaggaccgccgcggttgatagaaacccatttgtggatcaggcgtttaaatatgccgtgaaaatcatcagccatttcaaactctgtacgctcatcctcttgctcatcttcatcttcttgttccgcgctgatgcttttgacatggtcgatgttaaaatatacaattccatcatcttccgtttccagcacaagaaaatcgtcccctgtttcgtgaagctttccttttttcgattccgggcctccctggttcaactgcaccgtgcgattggccattcgttcgatcagttcttggaaatcatcggctttttcgcattctgccgactcggccggcgatactgtctcactcgtattttccgttacacttttcacgtgcttccattgatagtaaacgattttattatcaacctgaagagcgatataatccgattgaatatctgccaatcttcctgttttggactccgggcccccccggtagacagtaatcacttttccttccatcgcatgcaaaaagttatcatcagaccgatgccgattcgtattgcgtttcatctattgtcctcctagtcatatttctcattaatgtcaaaacataatgcatatatacgtatcccgattcttttcgggaactggttcaccagcctatttgtaaaaaaatttctcttctttccaaaatcaaatattccactgctttagctcactgctgatgaaggcagaccgctccttaatgtattcgcaaatcacatcaggctcacggtcaaagcggtcaatctcatctttcttataaggatccttcgcgacaaacggcctgatctgttcatacagagacatgacctttggtttcatatgttcaatggtaaaccgggtctgaagcgtctcttccaaaagctgtttgtacgctttacggaaatacggttcatccagaagcctagcagtcaaggtattaaacccttgtattctgacataatcggcatccatccgatccccgtgaatgtctcttccccacgtcgcgtcgtaatcccacggaatgacttcaaaaagccccgtttcatgattccggtacaaggcgtaattatgaacaaacccatcgtagttagaggtaaacacgacgcccgcaagccaccgcagatacttatccgcgtccaggtgtttgacaatctcacccttgaactccgacttcggcacggtattaattttatagatcatatcctgcaagtaaaaatcgtcttctttcgttcccgttttcttttcatagccaagttcgagcgatgttttcgtatcccgctcgagatcactgacaagggaaaaattggcgtcatcatcaaccgcgtaaaaaacggcgccgtccgccagattccgtttcgccagaaaatattcatccactgactccagctcaaggtatactccctcgtatttgccgttgatttgcaaggatacgaaattcgccttcggtgacagtgtcccaagttccgcgaagaaatcgagagacagtttattccgcatcatcgacggatctttgtactcagcgtttaaatgtatttctttcgccctgcggaatgttttcggcgaataaaacgtgatatgatacgattttttcttaaaatctcttatatgagagccgcggtacgccagatcaatgtcaagccgtttttgattaactctcagcaccgcgggcaccggatcatcatcccaaatgtcttttttcagctcccacaagtctttcgggtgaataaacagctggtattgaggcaatgttgattggtccttcacctgtaaacctccctgtattaatttaggctgtgctttttatataaaactcagcggaacacacatacacttttttcttccatgcgtactatgtggtagtaaggatcgcatccttaaaacatatatcaagaggaggtttcaaaatgggccactattcccattctgatatcgaagaagcagtacagtccgcaagtaccgaagggttgaaaaattatttgtaccaagagccgcacagcaaaaaaagcggtaagaagagaaaatctcgcagccataaaaaatctcgttcacacaaaagatctcgcagccataaaaaatcccgttcacacaaaagatctcgcagccataaaaaatcttgccgttcacacaaaagatcacgcagccagaaaaaatcgtgccgttctcgcaaaaaatcacgcagccgcaagaagtcatgccgctctcacaaaagatcacgcagccagaaaaaatcgtgccgccgcaagaaaaagcgcactcagaaaaaaccgtaccgttctcataaaaaaccaagccataaaaaagacgattactgcagcaaaacagagtactggaaagacggaaatgtttgggttgtaaagaaaagctacaaataatcccccaacaacctaacaccatgtaaataggctgccggctaaacggaagccttttttcctcaatcagatatatgccacgagataagatatgcagccgggtttcttttgttgtgtttccgaattttctttcggtataatcaggtcatacgaaaaagaaaggcggccgaaatgatgcatatcttacgggcagacgaactgaacgcaaaagacacctacaaattgctttccggcactgtagttccccggccgattgcgtttgtcactacgcgttcatctatcaacggcgccgtaaacgcggcgcccttcagtttttataacgttatctccgcagatccgccgcttcttgccatctctgtaaaccgcgcggatggaaggcagaaagacaccgcgagaaacgcaatcgctcatcgggaattcgtcgtgcatgtgagtgatgagtccattattgaagacattaacaaaacggcggcaaggcttgatcctgatgtcagtgagcttggcatgacagacctttctgtgacagacagcgcttgcatcagtgttcccggtataaaagaagcgaaggtcaggtttgaatgtatactcgaacgccaccttccgtttcaaaatgacagcggagaaacgacaacagatctcatcattggcagagtcgtttgttttcatttgaatgaccaagtatatgacgctgataagggctacatacggacggatgagctgcagcctgcggcgaggctcgcggggaatgaatatgccagactcggaaagacatatacactcgtccgtccgacctgaaacagaacctaatataatagaagaaactagtcaaaaagacccctttcaaaaggggtctttttcagccatttatcgtttaacacaatattgaaacttacaatgtcctcacccgtatgaaacgaatgacaagttttaggaggagccaatggatatcattcatttactgattttttcagccgtatttgttttgttcagtctcatgtttcaagtgtttgccgtcaacgttctcgatttgccacagcctgttaaaaaccagatcgaaatgtcactgcttattacaggcaccgcagcagtgacatttttcaatgaattgtacgtatttgcgggagttatttctatgtttttttgctgcagcggcttaatggaatggcggcatcagcaggagaaaaagcaatatttgtacgattcgttttacgcaggtcttcccgccgcacttggcgtgcttatttttttcatccgttagcggatcatgctctatactcctgcagccgctccgtctccgcgcgggtcggttccgccttggagaaagccttcttcgtcaatgacgatcgctgctgcgtgtcccatgagtctgtcaaaatcgccaacggcctcaacacggtggccgctttgctttaacgcttccctcgtttcggggctgattctgctttcgaccctcaacccttcgtactcctcgccccatgtccgtccccagacccagcgcggctcactgacagcctgctgagggtccattttgtaatcaatgatgcgcgtaatcaccgctgtctgagtttgcggctggccttcccctccctgagttccgtacaggatgtgcggctttccttctttaaaggccatcgccggcatgagtgtgtggaacgtccgcttgcccggttcaagtgtattcacatgagattcatccagtgagaaaaatgacccgcggttttgcagcagaatgcccgtctcccccgccgtcacggcagacccgaactcgaaataaaggctttgaataaaggaaacggcatttccttccgcatcgacgacggcagcgtaagcggtgtcgcttccgaccggccggcttaccgccggcgcagccatatgaccgatttcttccgccagctgctttgcataccgtttatcaagcagtcgatccagcggaatatgagaaaacgcgggatcagtcagcacttcattccggtgctgaaaactctttttcagcgcctcgatcagcagatgataatattcaaaggagccgtgttcaatctgggtaaaatcatagttttccaatatattgagcgtcattaagcctgtaaagccctgtgaattcggcggagcctgatagatgcggcacccgcggtaatcagaggataccgggtccgaccactcgccgcgatgggctttaaaatcttcaagtgtcaaatgcccgccgttgttttgcagaaatgatgtgatgctttgagcgagatccccttcataaaaagcgctcctgcctttttcggcaagctgttccaagctggccgccagatctttttggacaaaccgctcgccgggcatgggcgcttttttgtttctcgtaaaaatggctgaggtatatggtgttgaagctaaaagagcgagattgcgttctgtgtgggcgcactggtcggcggacaccggaaacccgtctgccgcataatcaagagcaggcttcagcacctcagcgaacgaaagacgcccgtacgccgaaagcacggcatcccagctgtccgccattcccggaacggtaatggcgctttctgtcccgcgcagaggtatcgcttctctgccccgatacaagtctctcgtcacctgcattcctgaacggccgctcccgttatatgctttcatcctgcccgattcttgatgatatgtaagccaaaatgaatctccgccaagccccgtcatatgcggatacacgactgccaggcaggcgctgaccgccaccgccgcatcaaacgcgttgccgcccttctcgagaatgccggcacccgcctgagaagcaagataatgcggactgacgaccatttgtttcgttccgatggttgaagtattcatgacaagcccctttacaaattttctcaattataaaaaacggcaccgctgggcatctactttactggaagaaaatctcacacactatttactttccgaaaagaaatgatcttaatctattacttatcgaaaataattgaaaaattctccttcattccgtaagatttcatgatacaatagtatctgccaaatgaaggaaggtgaaactgattggaacatgagtacagcattccgaatcttgtacttgatgaaacggataaacatattctctcgattctgcacgaggaagggaggatttcctatacagacttaggaaagcgggttaatctgtcgcgagtggcggttcagcagcgcatccagcatttactggatgccggcgtgattgaaaaattcaccgccgtcatcaacccggcgaaaatcggacgtcacgtgtctgtgttttttaatgtggaggtggagccgcagtatttggaggaaacagcattaaagcttgaacaggaacccgccgtgacaagcctttatcatatgacaggcccgagcaagctgcatatgcacggcattttcgcaaatgatcaggagatggaagagtttttgacaaaacggctctatacgcaaaaaggcgtcgtcagtgtcgattgccaaatgctgatcaaacggtataaaagcagaacgggcatgaagctgtaaggaggacacggcaatgaaaaacccctattgggacattacggcggcgatggtgcggacaggcatactcggattcgggggcggcccgtccgtgatcccgctcatccgccatgaagccgtcaataaatacaaatggatagatgatgatgaattcggggaaatattagcgatcgcaaatgcgctgccgggtccgatcgccactaaaatggctgcgtatctaggcttcaggctaaaaggcacgttaggcgcaatcgcggcaaccctcgcccacattctccctacatgtctcgctatggcgggcttgtttaccgctgtaaatgtgttaagccattcagcggttgttgccggcatgatcggtgccgtcacaccggtgattgcggtaatgcttggtatcatggcatacgaatttggacaaaaagcgctgaaaggtttcggctgggtcaccggcatcctgtttttcatcgtcgcttttatcggtctgcaaacgttacagatcaaccccggccttgtcattatcatttttttagcgtacggtgcgtttcattttaaattgaaaaacaaaatcacaaataagcattcaaaagataaaggaatgtcgtccccatgataatgatctatatatttatggcgttttttatcgcaaacctgctgggatatggcggcgggcctgcgtctatcccgctgatgtttgaagaagtcgtcaacagatacagctggctcacaaacgatcaattctcaaatatgctcgcacttgcgaacgcattaccgggcccgatcgccaccaaaatcgccgcgtatgtgggctacagtgcaggcggatggcccggctttctgatcgcgctgatcgcaaccgtcgtaccgtcggcgcttgcattgatcgtcctgctgcgcatcattcagcgcttccgccaatcacccgtcatcaaaggcatgacgctgtccgtccagcctgtcattgcagtcatgatgctcattcttacctggcaaatcggcgcagacggcatcaaagcgatcggctgggttcaatcaatagtgattgcggggatttccctccttgccttgacaaaattcaagatgcacccggcatttttgattatcgcggcgtttttgtatggaggccttgtgatccctcatttataaagaaaagcacctgggcaggtgcttttttatttaatattcatttttcatttctttcataaaaataagatccaattgtgtaattaaatctttaagttcactacacataatatcctcaataggatttacccaatcttcgttttttataagttcaatgccataactgccggttggatccccttctgggtaccaccctacgtcaagcagtaaattttttgtcttatgagaaacctggaggagatcttgattaaagtcaaataaccaagcatcatcatttgcctctagagtcgtaggatcagtatcttttaatgtaatataatcaacagtccagccagccggtatcttaagccttaagaaattgggaacctgttgacttagaggctgcaaatcctctaaaaccccactgccaacactccagatctgatattctagctcttctaataaatgctctatttcatgaaaagatttttcttcataaatcttatctgtttttaagcccgctactttgacatggtattgatcattttcatatactgccttaataacagcattacgtttttcattttgtagttctagtagttcatatttttcttccgttcttttttctgagtttaaattgttcagtattacagaccatccattacagatttttagtggctgcaattgagaaatttgatctctgtacatcctgattctcctccattccagtaagaagtttaaactattctaatatatcagtaaacaaggcttctacttatgttaatctcctgttgaaaggctgtatacaatgagaaataaaaatgccattccttggtgtctatagactgacgattcttgaaaacctctcttaatctttattcatagcgataaaagtcccgttaggataatcaccattccaaccacacggaaaataacccgctttataaatttcaaaaactttttcaaaaaaattatttgtattaccattaattgctctattaatagcacaattgtttaggtcagctactatatcctcaaaaaaggcattatatccagtagaagcacttctgatgttttcagaaaaaatatctaataacgagtctatattttccggcttttgattatcttctaattcgtaaaaacgcccccatacttcactcatctcaatttcccttatatctttccatgtatattcgtcttctccatatacttcttcataagccaagtattcagcctgtttttgatcattaattattttaataaaattagatacattaactgattttataggtttgaaggtttttgaaaattcaattacctcttctgctagattatgatatttcccaaaattcattacttgttatgccaccttctgtactccacattgttatcctatccgtaaaaaaacttgccgatgacaacacggcaagtttttaactatagcaattctaattataacagtaaacaaggcatctcctaatgttaatcccgtgttgaaaggctgtatatgcggcaagtcacttcactgttaattgttctgtagcgttttagtttttcttattgaaaacacatttttttaaaaaaattagaatgacttcaacagccaatcaaggtccattaatttacctaatcctcaattaaatcgagataatatttatcatttttcataagttctattaaaaactcttctaatgaatctgcaatttttatatcatcataatatattgaattattttgttcattgcctaattcaattagtaacaaagcactttcatttgcttcaaagaaaatcactttatcttcttcaagttcctcataaacctcaatatctggataaaattcaaaatcattaacttttaatcttgcatctctgattgaagcaggtccaagaatgcggttaatattatattctgattttttaagaaagccgtaacccacctcaagaagaaactgtctcaaatcataaggtagccttaaacctaacttattttctacttctaaaatttcattctcacttactggataaaatgtgttctctttgtaactgttaataaaatcatatttcacaattatttacctccttttctgaaggcacggcctgcccagccgacgaccggtatgaatctggcagcgtccatcgctcctgctgtgacgcgttctgcggttgagagtttttccccagtaaccgcaacgcagcctaaagccaacaaattattcaaaatttataaaacagaaaacaacaattcacctataaaaaaaccttgaaaggcttcagcagccaatcaaggttcgaaaatcaaacttaatgcagcatttatcctgaatagtattttaataatatcctaagattttttaactatactattaataccttcaaatatgatatctctcattacttcattattattgttataatttctttcatatttaattttattaaaaacctgctttataactccatcaatcattattgttaacccttctatttcttcttcactaccctcttttttaaaattttcatttaatattaccaagctatcatcttttgacattccctttattctctttctcattaaaaattttgtctatataattaatatcatcaataatccagtatctatcctattcacaaatataactagtaaagtcttcacgaatccctgtccaatgatcaggaatataattttcaaaaggtaataactcaggatacagcgaaagaagcattttttgattaaagtctatatataatgatggccttaattctagaatagtactttcataatcctgatgttcaactaacttctttaattctgaagacgggataatataatcagtatattcttttaaatatagacgataattctcttcattatcccattattttagcgctgttcatattcaaaataaattgtattccaatttatagttggactatcagttaacttatactctaggttgagataaactagatcatcaacattaactatattaagagaaaaaacatccttttaagtagataattcgactcttagttttcattttaatgggaactaagcagacatcagtcggtaaggtaatagcgctcttcattattcatataaattttctatttcagtaccccaaaagcttccttctcttgtgcaatttgagtctactcttttgagttcttcttttaaccattcgattacatattccggaatatcattatcaataaatgcatcctcaccatttatgtgtatagccttgtcaatcatttctgagaaaagcaatatacattctgcaaattgatttattgaagagttaataaaaacttctttatattcattaccattatctaaataaacgattctctcgttgttttctataatacaaattggatctccggaaccagtagaacctaacaaccaatatttttgaaacccttccgacacatcaaagatacttgtaattggcttaaatgacgctggaaaggaagtaaaatctaaatatggcggaggggattcaggcaaacctcctaaagaaataaattttttaaatccctccgaaaaaggagtctctactaaatcatcatatggaaacgttaataacggaccatttttattaacatcccaacttcgattaaattcttcgggtaataacatcgtgtcaccttcctgattcttttctgaatgtttctagtctattcgcaatttcatcgtctactccagtaattccccattctttttcaatattatgaataccaccatatccagggtgcaggcttttaggtagagctgcggcctggcctccttccccaatatgatgatgtctcattgggtcttttaaataatctgcatactgtggaaaatgttttataaattgttcatcaactactgggactcttcctcttttaatcttagcagtattttcagcactccaaaactcaggattactttttagtagcgtgttaaaaaactttttcgcatttcgctcccagccagccgcatttgtcccagattttcccttccccttaaaattcatctctactacaagcctaggatcaattaaatacttattttcgtagtttgaaagttctctgcccttatagcctctaattcgatcgtatttaccgtcattattccatttagccgccatcttcacaatcccaagatccttaacagcagccgtttccacatctatacggactgttgggaatccgaacgtgaatccatcagtcgttaccgggcgttctgcgtacacgcggacatttgtcgggactttgaattgttttactttttctagtgttttgtttgctttttggacttttgaatgggttgcaagcggtatgcctttgttgacatgcttcgccatcgccccggctccaaccaagctcaaagccgcttccagcgccccttgcttgcgcttctcctcagatactttgtttccaaacatatctttgcctgtgaccgcttctgagaatccgtttgaggcaacgaggccgtatgcgcccatttctgacattttgagaatgtctaaggatttgcctgctttgtaggcgtctaaagcatgttctgcggcaatgacagtttttccggttttgtaaatggcttttccgcctttgaaggcgcggcctgcccagccgacgaccggtatgaatccggcggcggccattgctcctgctgtgacgcgttctgcggtggagagtttttccccggtaaccggatcaacgccttctgctgctcttttataatcataatagccagtgacttctccagtaaagttgcagatgccatcccatgttttctcgtaccatggtttattggcttcttcttcagccttttcctgaagctgtcttgcttcggcttgctgggctttcgcatcgatatatgctgttccctgtttttctgtttcaatgacgcttttgtagatttcattgctgtggaaggcttttttgtcatagtacataggggatgcgctttttccgttgctggtggcctgcatgagtacggaatatttgctgagcactgcgttgtccagtgattctaagttttgatattcagtgctcagggattcatcaagcttatcgactgccgtgatcgtgtcacgtctggttttctgggcatcgcccattttatctgcgtagtcatcaagtgaatacgagtcgagatgaataatatcgctgatgcctgacaaaatcgaatcgatttcttgtttatgagcggagacaatctctgaagctttcaagtccgcgttagccagctcgtgctccaaaaatgaagtctccacatatgaatcactcagttcttgatcttttatgtcacctgaaatgccatttaaaaacgcaatttgagcagagacaagcgtcagccagctgtcggcgatttccgcttgcccctgaaagaaatcctttatattgtctgcgcctttccctttcaaagcatcgccgagatcagccatgccttgaaaggattgtttgagcgcatgcagctgctcttcaagagcttcgtattgtttctttctcttgtctgcttcatccgttaacgattgtgattcaaacactttgctcatcggcaagtcctttctttcgttattttacggcgatcgcctcgtcctgttctttcagggagtctacgttgtcttttacgtccgcgatattcttatgaacggcttgcttatattcgctgatcatggatacaagctttgcctcgcgggattcatacttggaggtatagtcgagtctgttttttccgtttgaaccggcgctcccgatagaaacagcctccaaagcgctgctgacggattcaagctgcttcatgacggctccgtatttgagttttatttccattaaaaccaactccagcttcttttgattgattgtattttgtctcctactgcgtcaagggcttcttctccaagcgtcagcaggtgctctgcctctctcgcgatgcttctggcggcaaggagccctcctttttcaatttcaagctgtgtcatcttcaagccgattcgatacatatacccgtcgtatttatctgtgacgattctgtatgcttctgtatgggcctgatcgcgcttgtcatcaaattcttcagcgaaagtgccggtccaatgatgatccaagtgcggtctgaggatgtctttgatttcagacatggcctcttcctgcagagattctatctctctcttcgcttcttttaatttttcaatttggtgttcgatctcgcccagtttatggctgattgtgctgttaatatggcttaatgtgcttgaatggctcatctgttttcacctcgtcttacgcaaaaagtcgtacaaaaagcacagacttttccatactatatttccatatattatattttaaaatagacagaaagcggcttaaataggttaaatgacttattttcaacagccaaagcgctcaccattaacgccaaaagactcacatacccggcatatccgttcacagatctcctctatatatccatgataaattccctaaaaaaaggagacagatttaaccgtctcctttgccgtatatgatgatcaaaatgttcggttaactgcagtcccagttgtacaaaacatttgagaaatcttttttcttcaagtcttccggtctgataaagaaattggcgattccgacatctccccacatcgaatcaatgtcatcgtctgaatcaatttgcagcagcagaatcgcatggtcctgatgagaataagaccgcggatcttcctgggtaaaggacgcatatccgcctattttatggccgaatgcgcttgccgtatattcgtcatacacctcgtcgtcaaactgctcgaaatagtcgaaggcatccatcccggcatactgcctgaattgaaaatcagacgggagcacccattcagcagacagttcaggggtgatcagcgcttcggattgaatcggaaaattgtactcatcctcagcctgaacgaaagaaaaatcatccatgagctccgtttcttgctctgtcacgcgctcaaaatatttgacacagaaacccgtttgcgcgcacccgtcgtcaaaattcagaccgtatacgtcatcactgaccgatatgtaaaactgaagaatacctgcatccggaaaatcaggcagtccgggcatgtccgcaaaattgatctgggcgaggagcttcatcggcctgccgctttcatcttcaggatacggctcatgtttcggataatagggatctccggcgattttactgtcataccgtcccgtttcagcttttttgacgtgcagtttgataaaaggcctcgatgacgtttccagcaggccgcgggatgattccatttgtttcggcaaatgccatgttttttccacgattgatgcccccttcgtttctaaataattgcataataaaagaccggcgcggattgccggcctttcaagtgacagaatcagtctgaggcacgaccgctcttcttccgattgagatatattccacgcccgcctgttcggcttcctcaagcgggtggcagtttctcccgtcgaaaataaccggggtttccatcagctctttgtaggcttcaagcgggaaatgcttaatatgttcccagtctgtcaaaatcaggacggcatccgctcctctgacggctgattctatggagtcccggtaagaaaccgtatccggaagcagctcggaagcccggaatgaagcgatcggatcgtacgctgtaatccgggcgtcaagagcagccagacgatccgcaatgacaatggacggcgcatcccgcatatcatccgtattcggcttaaaagacagccctaataaggctatggtttttcccgtgacgccgccgagacgattcagcactttatcaaccagcatagactgctggttattgttgactttaatgacggacttcagcaattcaaaatcatgctccacatgtccggcgatctgcacgagggcgtttgtatccttcggaaagcaggatccgccgtagccgatgccggctcttaagaattgattgccgatccgtttatccaatcccattccgtgtgcgactgattccacatccgcaccgactttttcgcatatatgagaaatttcattaataaaactgatttttgccgctaaaaaagcgtttgacgcatatttgatcatctcagcgcttctgatatccgtatgataaaccggaatggcaagcggcgcgaaaacccggtcaagcgtttcccgcgtttgccggtcttcagtcccgatcacgatgcggtcgccgtgaaaggtatcgtgaatcgccgaaccctcacgcagaaattccggattcgaggcgatcgaaatgttcacgtccgccttcagccgtgaatgaataacctcgctgatcctgtcattcgttcctacgggaaccgtgctttttgtcacgacgatcacgtcttttgaaatatgttcggcaatcatttcagcgacattttcaatataagtaaggtttgcatgcccgtcttctttttgcggcgttccaaccgctataaagataacgtctgcttccgcaagccctttttcgtagctcgtttcaaaggccagccgataccggccgatatttcgtttcatcatatcttcaagacccggttcaaagataggggacattccctttctcatctgctcaaccttacgttcgtcaatatctatgcatgttacgtcatggccgatttctgaaagagacactcctgtcacaagaccgacgtagcctgttccgatcactgttattttcatcgtgttcccccaaccgtttagaaattgctgctgggcagcttaccgttattatcatatgaccccggcgccggcagaatgccggaagcctgcggatttgaagggaaaaaacggcgccggccgctgataatagcataagcataaaaggatcatcttgcaaaacagccgcttacgcctcatttaaacgggatggagacgacgattaaaaaagaccccagcgcttacggcgggccacaggcagcggaggttccttataaacggctttgttttcaacaagaagcgccgcgttttccgtaagcatgtaaatcagctccgccccggcttcttttttcagaatgccgagcgcctcctgataataaaaatttctcgatccgagattatgggcgtcagatgcgagaaagtggatcaaattcgcttcaataagctgcagcgaaaaggacttcgctttccgcccgaatgccccggcaatgcagctggccgtcacttgggcagccgcgcctttcttcacgagactgtaaaggacggatgggttttcgcggatttctctgttccgctccggatgggcgatgacggggacatatccgttcagctgcaattcataaaataacctttcagcgtaggccgggacatgatccgccggaaactccgccagcacatactttgtatcatggagcgggacaagcaagccgttttgaagacctgccagcagacctccgtctgttctgatttcctggccgggcagaacggtcagcggaatgccttccttattcaaacgtttgtttaacagtctgaccgcttctttgaccgtatgccggtcagtgtcatagcggtatttcatgtgatgcggtgtcgcgatgatcgtatcaatcccctgtctgaccgcttctctcgccatcttgaggctttctgtatcatccgcagcgccgtcgtctatggaaggaaggatgtgacaatggatatctatcatattacaatccctccttaaaaagaatggaccgcgcccattatgacattattgtccataataagcgtagtccgagtgtttcgtttgtctcttcccgttcatgacggccccaaggagcttgcacgggcagtaatcgagcgcttctttcgccttggccgctttttccttgtccgttttcccgcttgagatcaccataatggccccgtcagtatagctgcctaatattttcgtatcagctacggccaatacgggaggcgtgtccaaaatcaccttatcataaacgtcggttgcttctgacagaagatccttcatggcatccgtcgataaaagctccgccggattgggcgggatcggcccgctcgttaaaatatccagattggcttcatcagccggtagaacggctttctgaaacggaatctgttttaacagcagcgatgttaagccggtgccgttatccaatttgaaggtgaaatgaaccgtcggtttgcgcagatccgcatcaattaaaagcacttttttcccctgctgggcaaatacgacggcaagattggctgcggtagtcgattttccttcttccggaccggctgatgtgatcagaagagacttcacctccgtatcaacggaagaaaactcaatgtttgtgcggatcgtacgatattgctctgagttgatggacttcggctctgacatcgtaatcacgcttcgttttgcaaatttgtcttttttacgcgtcaacatgtccgcctcccgcttgttttgtttctgccatcctcaagcctttagcgaggctgtcttttgtaatgattgaagtaaccgttcccaagaccgggatgccgagcaccgattccagctgttcttccgatttgatcgtattatccaaatgttccagcaaaaaggcgagaccgatcccgcccaaaagtccggcggcaaacgcaatcgcgatattcagcttacggttaggctctacgggtgacgggctgtccgccgcttcggcctttgaaaggatgctgacattatccacattcatgatggttgtgatcttgtcctgaaaaacggctgcaaccgcatttgccataacggctgcccgctttgcatccgtatcccgcacggcgattgtcacgacttgtgaatcctgctcgctggataccgtgattttcgattccagttctttcgaagtcattgacagtttcagctgtttaattacttcgtcgagaatgaccgggcttttgatgatgacattatacgtgttgattaattggaggttggtttgaacgtcattgaattggacttctttttggttgtttttggattgactgaccaaaatttgagttgagttttcatagaccggcgtaagagcgaagaaactgatgagtccgcctgcggcagccgccgccgcggtaatgataagtataaacagcagacgctttctcagtattgcgaatatttcctttatgcttgtagattctcccatataacctccatatcgattcctattccctccaatgaacttttccaattacgattatacagctttgaactgtcatttctaaccttttcaaatgacaatattcgacaaaaatagacaaacacttctattcggtttatttttgtaagcgttttatacactggttttacaggggcaataaaaaatcccgcggtaaagagcccgcgggattttatgttgcatatccatttttaatatgagaaatcaaattctcaagcatttcttttgtggtcatctcagaggactgctcaccgatgtcgtgcgcatgcattaaaatcttcagaaactcctcttgatctaacttcgttttcttcatcattcgtttcctttcggcttccattaaattgaaaacaagattattatatgctgtcgggtgctgttttgcaatctctaatacatcattcgacacactcgggtttttatgtccttttttaggaaaaactttttccgaatcatgtgttgcgatataatagaggaattggaatctttttattttgtgactcgttaggagcgataatcatgcttcagaatatgattgctaaagaagatgtgctcgcagcggctgaacagcttaaagaacttcttccttacaatgaagacaatgttcagctgatgaagaaggcactcattttatatcggcaggattccgtctatcgtatacaggttcaaaccccgacagagatttccgcatatgtgcaggatgttgtgcctgtaagggtcacgctgaacttatttttcatggtgaaaagcggctgcgcatgcccgtctgagacgatctgccgccacgtgctggccgtttttctttacgtatatgcccaatttgaccgggtcggttcctttaccgagcattggcttgaaagagaaaagcttgaggaaagcagggagcttgtccgccggcagtttcaggaaaaaatgctgccgaatgaagagtcgctgtcaagctggctcgctttttttgattcggaattctcgctgtgggaagcgcggacgccggccggaagccagacgatgcaggggctatattacggctatttgtctgcgctcaaaaaacacgccccgaaaaaacctgagctcaaaagcttatatcagattcattcggcgcttgccgtctggcttcacatgtttactttgattgagtcaggcagattggatgccgaaaaagattattacagcatcaatccatatgtggaacagctgatggatacgatttactcctccattgacagactgaaaacgtacgcgttgtctttctcgcttgatccctttttggaccggacgcccccggtgctccgcaagctgctgttgaaagaagagctttttcaatacgaacgcctccgagtattcggcgaaatgtggagcgcgcttttgaatcggccgaaatggatcgcgcgtgaacaggagattctcgcacaggaaagccgacgccgtttttcgccggaattgcggttcggacggcttcatttggcctttttgcaaaaagatgatacagcggtctttgaagatatgtcccgcttccctcctgaggcgctgccgtatacctttcaatggctcggtgagctcaccgcgaaaaaagactggaaacggctgaagacatggtatggtcagatcgaacctcttgccgtgaactatacgaagcttgataagccgtttaaagaaatgcgcgacattatcggagagctgtttgtgctgctggcagattatgcgcggcagtcacgcgatgatcagctgtttgaacggtttgcttccggctgccttccctatacctttactgaatacagccagtatctgtacgaaaaacggcggtacgcggaatgggtggagattcacagcctcgtcggtttttccgtctgggaaatcgaaaaggacatcctgaaagaaattgccgccagcgatccggaagccctcattccctcctatcaccgggctgcggccttttttatcgaccaaaaaaaccgcagcgcctataaagaggctgcgcgccatttgaaaaaactgcggacgctgtataaaaaggcaaaaaaacagcaggtatgggagcggtatatcagccagctgagcgcaagctacaagaggctgcgcgcccttcaagaagaattgcagaaaggaaagttgattgatggcgagtcttaaggaaattttcattcatgtagaacaaatggaagattggacatttacgctgtcaagccatgatgagaaagagcagccgctcactctcagtcagatgaagactcatttgttccaatggcatgagtccaccttttacggaacgtttcttgaagacgtcagcttcatcggcactccggccgctctgctcagcccgtggatgaccgtcgagctgctcggaaaaaactcgttcaattcattcagcaccgtgcagctgacaaaggaaacggagccattaattgaagcggcttcgacgatatacgaatttattgccgacggcgattttcttccggattatgaggcttggcaaaatggcatcctgcgcttcaaagaccgcgaactgttgctggaaggatttacggcagactggttctcggccgcggtacaagactacatccagtacaatgatgacctgcacgaaaaatggcagcatatcgaaacccgttcgccggccgttcatacatttaaaggctcctttttggatgaagatgattttctcgaaggaatcggctggcatgacgatctgacgccgttttccgtcggcctgcgattaaacgagcctgatttcgatggcgacgactggaaaatcgaaatgtttttacgtgagaaaaaaactggcgccatcacctttttcgacggactgaagggactgaaaaaagcgtggcaggcatacagcggaaaaatcgcgcgcgagcaggaccgcttccgcagaacggttccctggctttcgtttgattcgggaacgacgctgatttctgaagaagaggcatggatcttcttatcggaagcaagtgagacccttgtcgatatgggcgtggagattcttctcccatcatggtggcagattgtccgggacagcaatatgatgctcaaggcaaaagtgtcttcctcaccgcggggcgaatccttcgtcggcatgaacgccctgcttgatttcaactggagattcgccacaaacggaattgagctgtcagaggatgaattcaatgagcttgtcgcaaacaacaggcgtctcgtcaacatccgcggtcaatgggtgaaaattgatccgcaatttattaaacagatgaaaaaactgatggaaaaagcggaatcagaaggccttcatatgtccgatgtattggcgcgtgagctgatggatcagaatgaagatggcggcgaggacacggacatcattgactcatcggcatttgccgggatcaagatcgaattatcaaaacagctcagaagcctgatccgcaaactggcggatgcccgggacctgccggagcatgaagtcagcgccgcttttcaaggcacgctccgcccttatcagatgtacggcatgaactggcttctgtttttacgggagaacggtttcggcgcctgtctcgcagatgacatgggacttggaaagacgattcagatgatcgcctattttctccatgtgaaagagagcggacggcaaaaagcgcctgccttaatcattgcgccgacatcggtgctcggcaactggcagcgtgagctccaaacctttgcgccgcagctgaaggccgtgctccattacggcccccgccggccgaaggaagaagcatttgtccccgcctatcaggatgcggatgtcgtgcttacttcttacggactctcacacgccgatcaggaagagctttcttccgtgacatggagcaccatctgccttgatgaagcgcaaaatattaaaaacgcgcatacgaaacagtcccgcgcgatcagaaagctgaaaggcgtgcatcatatcgcgctgagcggaacaccgatggaaaaccgcctgacagagctttggtcgatctttgattttatgaacaaaggctatctcggcagtctgacaggctttcataaacgctatgtgctgccgatcgaaaaggaccgggacgaaaaaagaatcagccagcttcagcagttaatccggccgtttttactgcgccggacaaaacgggatgaagacgtggcgcttaatctccctgacaagcttgaagaaaaagagttcatcccgctctcagccgaacaggcatccctttatgagcagcttgtcaaagatacatttgaacatatggcttctctgaccggcatgcagcggaaagcgctgattctgagcatgctcggccgtttgaagcaaatatgcgaccatcccgcgctctatttaaaggaagaacagacagagctgttaaacgggagatcggtcaaactggaaaagctgctggacttaatggcggcgatccgcggccagggagaaagctgcctcatattcacccaatacattcagatgggcaacatgatgaaacgccttctggaaaaaacattcggagaaccggttcagtttttaaacggaagcctgtccaagcaggaacgcgattctctcgtggagcggttccagaagaaagaatacccgaccttgattttgtcactgaaagcgggcggaaccggcctgaacctcaccgctgccaatcacgtcattcactatgacagatggtggaatcctgctgtggaaaaccaggcgaccgaccgcgcctaccgaatcggccaggagcggttcgtccacgttcacaaattaattacgacgggaacgattgaagaaaaaattgacgccatgctcgaaacgaaacaaacgctgaacgatcagattatccaaagtgagaattggattaccgagctgtcatccgaggagcttgaagaattattcaccctcagcgcatcggcgcaatcacattgaacgtaaaaataccggctctctttgcagagccggtattttatgtcgtccttactgttacgccgcatttgccatgaatgcgtcacgccagtcatgaacagtatcgccaaatcttttacagtaaattcctgatcatatgtgcaacgccgttttgatcatttgtcaatgtaacggcgtctgcgatctctttaatatcttctctcgcatttcccatcgctatgccttttccggccgcctgaagcattgagtagtcatttaagctgtccccgaccgcggcggtttcagccatcggaatgccgagcttttgcgccagccgtttaagcgcctgccctttagaggcatttcgcgctgacagttcaaaattgtgatcggcagagctgacaagggtgatatctttctgatcgctgaatcgttcccagcccgctttcagcttccgctcatcaaacgaaaagccgagaatattgtaaaaatccaggcgctcttctttctcaaagagctcacgatatgatcgaatgtaagcaaaaccggactgactgaattgaactgaagccgcctgctccaaaatagaaagatcggtatccggattggcgcttttcacccggtccatttcgatttcgagcagctgcctgcccgtttcaggcgtatagatggctttgtttgtaaacacctcatagtaatattgattctcttcaagccaagacaaaatgccccgcgctcttgtttcttcaatcgcctcacaatggtacaggctgccgtcaggagcgtgaatggcggctccgtttgcgctgatgacccaggtttttatgccgagcggttcgaatatggagtgcacgtcaaaatgcgcgcgccccgtagagaccacaatttcaattccggcttgccgggcttcccttaaagcccgctcgttttcatcgctcacttgatggctgctgttcagcagtgtgccgtccagatctatggctatcagtttcacatgtcctcatcctcttcttcagattcagttacaagcaattctacgccgtgccggtcgagcaggtcgcaaaaatcctgatcgggcagccgatcggtaataagcagatcaatctcgtgcagttctgcatattgataaaaactcgtacggccaagtttggaatgatcgctcagcgcaatcacctgttccgcctggcggatcattttacgtttcaccataccgtcctcttcatgcggtatcgtcagaccgttttccgagatgccgacaacgccgatcagcaccttgtcggcgtgataatcccccagtttttctacgacagaagcaccgtataaaaaccgatgttccttttggagctttccgccgagcagatgaatatcaattccctcttttgcagaaaggatatcggcctgattgatcgaatttgtaataacagtgcagtcggtgacatttaaatgttcggcgcaggcctgaacggttgtggaggtatccagaatgatccggtctcctttatggatcagggaggcggccagcttgccgattttgtttttctcttcagaaacggttagcagccggcccgaatagcccggcacttcctgatgcacagacggcagaatcgcgccgccccgtgttctgataatcgccccgcgctctttcagctttacaaggtcccgtcttgcggtgtctcttgaaatatgaagcagcgaacagatctgttccgcggtgatccgccgatgctgtttcaaatattccattatcgcaatcagtctttcttcttgatacacgtcctcattccttttttcgtcacttatctgtaagtaattataagttttcatttcaatatattcaatgtttttaagtgtttataagtgaaatcacttctttttaaccattttttagtccccgtacaaaaaaaccagtctttcgactggcggatggggagggggtattgcggggcccgcaaaaaggcgggagatagaggaaaaaagcatgctattcagccagcggctctttccgtttttgatccataaaccgaacggtatcagccatgacctcggtcacatagacttttacgccgtctgtcttttcatagcttctcgtctggattctgccgctaacaccgaccattgaccctttttggcagtacagcgccgtgttttcagcgttttttctccagatggtgcagttgacgaagtcagcaccggtttcgcccgacgcgcttttaaaattgcggctcaccgccaaggtaatatgagcgacgggaatgcccgctgatgtaaaacggagctccggatctttcgtcagctgtccgacaagcataacgtggttaaacaagccgtgtcctcctctcttttcgcggctggcttcattgtagtacaagggcccctggaagcaaaaagcgggaaaaaccgttatccgtttatgccgctcttatgttttcgtttttctttctgataaaaaaaactttttcttttgaccgcttatgtaatatgtatttttgagcagccgcgagaaaagtttcgttttgagccagtctttctcaaacatgcggacaaactttccgccatcccatgcgaaccagtaaaaactcagctttttatcagacagtgaaagctgaattttatactgttccatgcggtcttttgtttcatataaaaaaacgacattcccgcttctgttaagatgcacctcacaatcttcctttttggatactaagtaggaatgatcttcccgccttgtgccgtcttctatatagatttccttcaggcgcaattgattcataagcatctctccatgaccatattcttttacattataatgaaaaaatagaaatgattaaatgtcggccgcctacaaagatgatgaagcatgtcttacagctttttcccgaaaaaagtaagatgtgttataataaatgaacgaaaaacatggacaacaggggtgaaaatagagatgaaaacatttaaactggttgatctgaatgtggaacgtttagataaagacgatcagccgattgaacagtttccccttttagacggattgattatcaataaagaagacggtgaaaatcattggttaattgaagctctggtcccggccgagcacttttctttttttgacatgctgatgaaaagccagaaagaagcgaaggtgtttgtaacgattacgaaaaaaagcaaccgtcccgcccagctgtcgggaagcatcaaaaatatcgtcgagctggaaaagagtattcaagttttaatttacggtcagatggtgtcaagaaatcaccccggatcagaaagcattcttgagtcactcgtgaaagaaggctactcgggcagccggctgattgaagcgttcaaacaaaaattgtaatcatgaaaaaggccggacattaatcatccagcctttttttctatcctagtcattgtattgagcccgctgtttcagcagatctctgatttcagtcagcagctctgtctgctgatctgtttcttcggcttcttccgcctcttcctctgcttcttttttacgtctcagctttcctattgtgcggatcacgataaaaatagaaaatgaaataataaagaagttcacaatggtttgaatgaagcttccgtacttgatatgggcgtcgccgaatgtcacggccagtccagaaaaatcaagaccgcccagaagcagaccgacaagcggcatgatgatatcttcaacgagcgacgtcacgattttcccgaaagcgccgccgatgacaaccccgattgccagatccatgatattgccccgcatcgcaaagcttttaaattcagaccacattacattcacccctttctatacaaaatgggcttttttaataagcccatttgtttttttattctccgagcgcaaaggttaattcagcttcacacacgagctcgccgtcaactttggcaacgccttttccgcgtccgatcgtaccgcgtgcgcgggtaatatcaacctcaagctccagcttgtcacccggttttacctgctttttgaaacggcagttatcaatccccgcaaaaaatgcgagtctgccccggttttcttctttaatcagcatcgcaaccgctccgacctgcgccaaagcctccacgattaatacgcccggcatcacagggtattcaggaaaatgtccgttaaaaaagtcttcattagccgtaacatttttatatcccgccgcccgttttccttcttcgacttccgtaattctgtctaccagaagaaacggatagcgatggggaataatttctttaatttgctgagtatcaagcattccttgacatctccttcatcgacaatagtatgtatagaaggtatatgcggtaaccaatctgtacatttggaagtatattatgaatcaatttctttttcaactgcgctgtaaactgtaaccagctggcaatgagcctcgtccattaatgtgttatgataaataaagatttttaccctatgcaaagaggttggaagatgattgctaagtttactgaaaaacgcacgctggtgatgctgaatgagtggtatgacgccatgggaaaacgccaattcgatctagcccgttcccttcacgaacaaatcaatcagcatctccccaaattacaaaggaatgcaaagctcaaactcagatatcagctgtttttcgcgcggttccagctgctgtttgagaaaaaagacggtctgaataaactgttctgcgagctgaagcggcgcaaagatgagatggatcatgaattaacttattatttctattttttcaaagggttattccatatggtgaatggcactccgaaccgtgcggtctgccgctttaaagaagctgaacagtatctgccggccatcgaggaccgttttgaagccgctgaattttattataaaacagcgggcgcttattacatgatgaagtcgtctccgctttccattcaatatgtcaataaagcgctggagatctatcaaaatgaattcggctacatcaaaaaagtgctcagctgccagctgcttctcgccgtgaactacatagacgaggcacggtatgaagacgcggaacagctcttcaatgaatccataaaaataacggatcggatcaatgacaataacctgctgtgccacgcctattataattttggatttttaaagaccgcccagaaaaaagatcaagaggcgctccctttttacaaaaaggtattaggcaatcagcttttcgagaaggagtctcccgtttcctatcttcattgtgtatacgaagcggtcaggtcactttttaaaaccgggtctgccgcagaaggacaaaccgtgcttcagaaaggattatacatagctgacaaagtgcagaacaacatcatgaagctgaagctgaccgcgctcaacatactgtacacctctcaggaggatccgtacgaccggctgcagaagcttgtgctggagctgcaaaaaattgaagcgtgggtggatttagaagtgctgcttcaggatattactgattactacaaaaaaaagggcgattttgagaaagccgcattttttatcatgcgcggctgatcaaaacgccccttcttttatctgactgagttgattaagcccagcatttggtctcccaatgtaatcgtgcggctgttcagctggtaggaacgctgagacacgattaagtcggtcatttcctttgacatatcgacatttgaattttcaagcgcgccctgctccatgccgatttcctgccgttttgcgccggtaagctcttcaatggctgaagccccggtgccgtttacggaaaacagattatccccctccgcatggagctcctgagggttattgacattaacgatgccgagattaaaagtctgcgaacgggttcctgtctggtctgaagctgtcagagttccggttttgctgattttcagcttagtcagcgaactgtcaatctgtatgggctgaccgttctcatcgagaatgggattgcctcccgctgtcatgagctgaagcagccgatcatttccgccggccggcttgagggtgagtgagccgtcccttgtatacacccgccgtccgcccgcttctgcctggaggtattgataaggtgatgtgaacgcgatatcaaggtcacggtcggtttttttgatgcttccctgccctgaatccagctgcggcgtcatcatcgctccggcgccgagacgcaggccgggcggtgttttccgcatgttcggcgaattttcctttttatcatctatttgatcatactgctgcctgatcagctcggaaaagcgggagtccctcgctttatagcctgtcgtatcactgtttgaaaggttgctgctgactgtatccatctgctgctgaagctgatttaaggctgttgaagccgccagcattgatctgagcatcataattgaacgtcccccattttgttacactttgccgatttcatttgcggctttatccatgcttttatcgtaagcctgaatgactttctgattggcttcaaatgatctgtatgcttccgtcatttctgtatacgtgctcgtcacgtccacgtttgaaagctccgagacgccttgctttaatgaatacgaaacttggggattcgccgccgcactcggcagttcagagccgtcggccgtgctgtataaatcgttgccgtcccgtttcagattgcgcacgtcttcttccattctgatgtcaatccgccccgcctgccggccgtttgatgtgaccgttccgttttctgatacggtgaatttttcattgtcgacggtaatcggctgtccgtttgttgataaaacaagatttccgtttatcgtaagctgattgttttgatttaatgagaaagtgctgctttttgaatagcgcacgcctcccgcggtctgaacgggataaaacagctcggcgttttcgttcgtttcagcattcttgggaacctgattttccataagcgcgatatccgtcggctgatcggtcgttttcaggcttccctgcgtgaacaatggtttcagctcctgcatgtacacgcctgtgttgacggaaccgattttcgtttttttgtcgccttcgattcggctcaagagcatctcagggaaagcgcggatcgagccttgatcctctttgtaccccgatgtgttcgcgtttgcgatattatttgacagcatttccgttcttctctgctgtgtaatcattgcggacgttgcggtatataatccttttaacaagtcttccacctcattatttccggttgccttaccggaacatttgttctataatgaaaatcagcattttttcttattatcggattttccttcccgttcgtgaagggtttgacagaaaaaaaccccattctttttcagaatgaggttttatgatcagctcagtttgcgttttggaagcttgtccatgttatcaagcatgacgcccgttccgaccgcaacacaatccatcggattctcagcgacaagaacaggaaccctcagctcttcagcgagaagctggtcaagtccgtttaacagcgctccgccgccggtaataataacgccgcggtcgatgatgtcagcggacaattcaggcggtgttctttcgagaacctgcttagcagcctgcacaatgacagcaactgattcacgaagggcttcttccacttctttgctgtttactgtaattgttctcggcagaccggaaaccatgtcacggccgcgaatggtgatttcttcatgacgtgcgtctgggaaaaccgttgcgaccttcaccttaatatcttcagcggtacgttcaccgatcagcagtttgtactcacgtttgatataatttaagatttccatgtcaaacttgtccccagccatcttaatagaggaggaggtgacgatatcgcccatagaaataactgcgatatctgtcgtaccgcctccgatgtcaacaaccatgttaccgcttggctggaagatttccatacccgcgccgatagcggcaactttcggttcttcttcaaggtacacatgctttccgccgcttttttcagcagcttctttaatcgctttttgctcaacggacgtaatattcgtcgggcagcagatcagcatgcgcggttttgagaaaagtccttttacattcagcttattaatgaagtgtttcagcatggcttctgttacttcgaagtctgcgattacgccgtctttcagcggacggatcgcaacaatattcccaggtgtacgtccaaccattcgtctggcttcttcgccgaccgccagcactttgccgctgtttttatcaagcgccacaacggaaggctcattcagaacaattccttttccttttacatggatcagtacatttgcagtaccgaggtcaattccaatatcccttgcaaacatctatttatatcctccttgatatctgtttcacagtaaaatatccacattgtgccctaattatatatattatcataatttatcaaaaaaaagctgctgaaccatataagttcttgacaaaattttgcggatattcgcgaaacgtcccggaggagaaaaaaggggccggcagacgtcagacgctacggctgctgaacgggctccccttcaagaatttcatcctttttgtactttaacttcgtcgcctctccccctcttaagtgcctgatggatttatgataatcgagtatttcttttacttcattcgccaagtcaggattgatttcaggcaggcgctctgtcagatctttgtgtacggtacttttggaaacaccaaactctttcgcaatgacacgaacggtttttttcgtctccacgatatacttaccaatcttgattgttcgctctttgatgtaatcgtgcacaccactcgacctccccagttggatgtgagaagtgtgaaatgagatccgtattctgtaacagattcactgatgatgccgcttcttcgttgtccgattatataagaaggtttttgaaatatgcccacgatccctcacctcaaacactctctttgttaggtttgtaacagtgtattagcaatgaattgggaatatgctaaaaactcaataaggacaaggggcgggatcacaattttctgctttttgaacgtgggctttacatccgcgcgatcctgctgtagaataaaaaagcgcgattagttacttaggtaagtttttttgaaaaggagaacggaaatgatccacgtcaacagacgcctcattcatcaaatcaatcaatgcgcccgcctgattacgaagaaagccaatgaacggctggagccattcggcctttactcctctcaatggtcaatcctatattgcttaaaaacgatcggaccgatgacccaaaaagaaatctggtcctatttgaacgtggaggcgccgaccgttaccagaacgatcaaacgccttgaagaaaacggctggattcagcgggaacagggagaagacaagcgggaaaagctcgtcgtcctgacgaaggaagctgaattgaaatacgacagcatcaatcaagagatgctgaagttcgaggaagacatgcttgcggatttccaagatggagataaagaagctttttctgagtttctgaatgtgtttttaacgaaatcataaagaaagggaagtgctgtacttttgagtaaatctgactcgatctggaccaaagattttataatggtcgtactcgtgaatttatttgtctttgtgttcttttatacatttttggccgtgctgcctatttatatgattcaggagcttggcggcagtgagtcgcaaggagggcttttgatcagcctgttcctgttatccgctattattacccgtccattttcaggggcgattatcgaacggttcggtaaaaaaagaatgacgattatttctctggcgctgttcgccctgtcttcttatctgtatttgccgatacacaatttttatctgctgctcggactgcgtttcttccagggcatctggttcagcattttaacgacggtcacgggcgcaattgccgctgacattatacctgttaagcggcgcggcgagggactcggttatttcgcaatgtctatgaaccttgccatggcgatcggtccgtttctcgggctgagccttgtgaaggtcatttcattcccggttttctttacgatttttgccgtttttgtttctttaggcctgttaatcgctttcatgattcgtgtgccggatcaaaacaacagcggaacgactgtcttccgtttttctttctccgatatgtttgaaaaaggcgcgctaaaaatcgcgattgtcgggttgtccatttctttctgttattcaagtgtgacgtcatatttatccgtttacgcaaagacgatccatctgttggatgtcagcggctatttcttcgtctgtttcgcagtgacgatgatggctgcccgtcctttcaccggaaagctgtttgacagagtgggacctggaatcgtcatctatccgtcgattatcgtgttctccgcggggctttgcatgctggcgatgacaaacagcgccctcatgcttctcttgtccggcgccgtaatcggtcttggctacggctctatcgtaccgtgtatgcagacgctggcgattcagaactcgcccggccaccgttcaggcttcgcaacggctaccttcttcacattctttgacagcgggattgccggcgggtcctatgtattcggcctctttgtcgcttccgccggattccatacgatttatctggcagcggggctgttcgtcctgattgccctgcttctgtatggctggagccagaaaaaaagaacgccgcttgaagcggacggaaatgtttcaatcgcagactgatatgacaaaaagccggggtgcagcccccggctttttttattctgccgctctttcccgcactatgcgccccgctgattttgcataaggaggatgaatgtacataagcgtcgtatatccgagacatgacacaagcacacccgcaaaccaggagatatcatagatgccggccagcgccgggacgtacatcccgattaaggaaataaatgcgccgagaaaggtcgcggcaaatgcacggtaattatagcctttgtaataggtgtactgtccgttttccgaataaaggtcatcaacggaaagctgtcttcttctgataataaaataatcggccatcatcactccggccaccggtccgagcatcccgccgatgagtccgagaaacgcatatacatttgtggcgctttccatcagcttccacggaattgtgaacagggccaaaacggcggtcaagtaccctcctctcttgaacgtaatatatttcggcagggcattcgccaagtcataagccggtgacacgatgtttgccgccacgttaaccgaaacggcggcgatgcagagcgtgatgactgaaagagcgataacgaaaggattatcaaaccgggccaaaatctccaccacatcccaaatcggttctccgaacgccacctgtgatccggaagtcactgtaatgctcgcaaacgcaaacagcgcaaacgttcccggcagcccgtaaaactgaccgcgaatctgttctttttgcgacgcggcgaaccgggtgaagtcagggatattcagaatcagcgtcgcccatattccgataatgcccgtcactccggctgcaaatggccaaaacgtttcagaaaaggtatggaattttcccggctgggagtaaatcgggccaagcccgccggcaatatctatcgcccaccagaccattccgccgaatacaagataaacaagcgggcccgcccacacttcaaattttttgatcgattccatgccgtgccgcagcacaagcaggtgaatgccccaaaagaaaataaacgacagaaagcccggcagatgaagtccgaacaaattccaatctccgccgagactcccccagcccggccatatattcagaagcaggatatgtaaagccgtgctcccggcaaatgtttgaattccgagccacatgatggccgtaaacgccctgagaagcgccggaatgttagcgccgtatatcccgtacgaagctctgatgatgaccggaaacgggaggccgtatttcgtaccggcatgcccgtttaaagccatagcggcaaacaaaatgagtgacgctgtcacgataatggcgagcacctgccacggtgaaagaccgatcgcaatgagtccgcccacagtcgcataggtcgggatgttatgaatacagcccatccagatggatgcaaaattcaccgctttccacgtccgttctccttcctccacaggcagtaaatctttgttgctgagccgattgttcgttgtttttttcatcttctccctcccgtatgtacggtttcctcacatttcatgttaaaaatataactgaaaattccgtaaataacattgggcgctgtcgacaataatcgttttgatttttgagcataatacacataaaaaaagagacagggagagcccgtctcttttgatgcggctgttaagaggcctttttgaggagaaccgaaaaccggaacgccatcaaaaggcttacggcgccgacaatgataagaatcgtgccgagcatatgaaaatggccggcggtaatttcttttccgaaaagaatgcccaaaatgacagaagacaaaatcgaacccagataccggcaggtctgaaacaggccggacgttgttccgaccatgtcagccggacttgttttcagcatggccgcctgaaacgtcacattgccgaagccatagccgacgcccagcacagacagaatcagcccttttcctatcatgggcgcctgaagaaagaaaaacgttaacagcaccgccccgatcgcggtcagacatgttccggcgacaatcggctgaagaatccctttcttatctatccattttccggtcaacggcgacaccaagatgctcatgcccgacataaacagcataatcaatccgcttgtctgaacggacaaatgcatttcatcctgaaaatagctcggaagcccgaaaaaaatgcagtaaaagaagatattcagcaaaataaattgaatatacaccgacgatagtttccgatgtgttttaaacagcctgacatcaataaacggcttctccgttttcagctcgcgccagataaacagcccgacaaacaaaagcccgaatacgccttctatgataatggggcttcgtactgaaggacaataaaaacgacaagagaaggataatcgccccggcaaacaagagtatcccgatcgtatcaagctgacggagcacggatttccagccgccgatctcgcgtttttcatccttcggaaacatatacagcccgagaaaaaagctgagaatgataaacggcagattgacgaaaaagattgcgggccatcctccccaaacgatcagaaaaccgccgagagtcggcccgagcgccgtcatagctgatgcaaagatggacagaacggccagcgctgacgcctgcttctcctgtatattcgaacggatcaatccgacgccggacggatatatcgcgctgcttccgatcgattgaaacagtctcataattaacaaagtcatgaaagtcggcgcaaacggcgcgccgatggccgagacggcaacaagcagaagcccgatcaaaaacagcttcttcctgccgagcatatcaccgagcttcccggtgacaggctgggccaccgcgctggccagataaaaggacgatatcagccaggacaccgtagtaaacgacaggtgaaattcatgctgaatgctgtgaagcgcaagagaaatcatcgacgagttcaacgggttcagcatcgtccccgaagccacggcagtcaaaaacaggacgcggctttttttggagattgtcatttggtctgcgcgataaattcttccgtcgtccggcttctgccgattttcgggaagataaacttgagtgtcgcttcgtgctgttcatcgctgaatgtcgccatcgcgtcagtcacgaaaacttgctgatacccgagctgaaaagcttcccgcgccgtgctttccacgccgatgtttgtcgcaatcccgcataatacgatcgtgtcgattccccgtcttctgagctgaagatccaggtccgtgccgaaaaacgcgccccactgccgttttgttaccgtataatcattttccttcacttcgatttcaggcacaaattcagcccaatccgccgccggagccgaatggcctgccgcctcttcatctgtcagcggcttcagcgcatccgctccgtcgtgaaagtctacgttcacaaagctgataaagccgcctttttcacggaacacatcaattaattttttcgtgttcggcacaacggcgccgcttttatcaaacggaacaatgcctttttgtaaatcgataatgaccaaagccgttttttcaaattgcagatttaatgatgtagtcataataattcctcctgatacagttagtgtttctcaccccgtttattttactctttcccgggcaggatttcttgcgccgtgctccggcgctctttttatggatataaagtcacttcctgtttatttgaaaatccgacattatataccgtgaaaaaccatgtcatataaccttacacgaaaatgttttatcgttcttttttctctataataatgaattaatcatgatcacattctgaaatgagacggaggaatacaacatgcagatgggcgatacagtatttatgttcttttgcgctttactcgtgtggctgatgacccccgggttggctttgttttacggcggaatggtaaaaagcaaaaacgtgctcagcacggcgatgcacagtttttcttcactcgccatcgtatccgtcgtttgggttttgtacggatattcacttgcttttgctcccggcaatacatggcttggcggcattgaatgggcggggctgaagggagtcggatttgaacccggaagctacagtgagacgatcccgcattcattgttcatgatgttccaaatgacatttgccgtgctgacgacggcgattatttccggagcatttgctgaacgcatgagattcagcgcctttcttgtattttcctttttgtgggcttcactcgtatatacgcctgttgcgcactgggtatggggcggcggctggatcggccaaatgggcgcccttgattttgcgggcggaaatgttgttcacatctcttccggagtcgccgggcttgtgctggcgattgtactcgggaaacgcaaggacggcacggcggcttctcctcacaacttaatttacacgttcttgggcggggcgctcatttggttcggatggttcggcttcaatgtcggcagcgccctgacgcttgacagcattgcgatgtttgctttcattaatacaaacaccgcagctgcagccggaattatcgggtggattgtaatcgaatggatgctgaacaaaaagccgaccatgctcggcgctgtatcaggcgctatcgccgggcttgtcgccattacaccggccgccgggttcgttacgccattttcttccattgcgatcggcttcatcggcgggcttgtctgtttttggggcgtttattggctcaaaaagacgttcggatatgacgacgcgcttgacgctttcggcctgcatgggatcggcggcacatggggcggcatcgcgaccggtttattcgcaaccgtctccgtcaatgaaggcggggcaaacgggctgttttacggcgatccgggactgctttggaaacagattgcagccattgcggcaacctatgtatttgtatttattgtcactttcgttatcattaaaattgtaggtctgttcattcccctccgcgccagtgaagaagaagagtcacttgggcttgatttaacgatgcacggggaaaaagcatatcaggacttataaagtgaggagtgacttagatgagcggtcaaatgttcaaagtagaaatcgttacgcgtccggctaagtttgaaacattgaaacaggaactcggtaaaatcggagtcacatcgctgaccttctccaacgtacacggctgcggccttcaaaaagcccacaccgaactgtaccgcggagtcaaaattgagagcaatgtgtatgaacggctgaaagtggaaatcgttgtcagcaaagtccccgttgatcaagtggtcgaaacggcgaaaaaagtgctgaaaacgggggagccgggtgacggcaaaatattcgtctacgaaatcggaaacacgattaatatccgcaccggagaagaaggacccaaagctttataaacatacagaacgcccggggacagcatgtcccgggcgtttttttcaatcttcatcaaaaagaagaaacctttttttcatgcgggacaggccgcttatgacgtgcggtttgtttattcgcatatgtactgatattgaccagtatgccgcacaaaaacagcgtcatgatcaatgaagaaccgccgtagctgataaacggaagcggcacacccgtgactggcagaagtccgctcatcgctcccaaattcaatacaacctgaaacattaattgaaacgtaattccgacggcgagaagcttcccgaacgggtcatcagcacgcacggctgtttttacgccgagaagcattaacgcaaaatataatcccaacacgatcagaacaccgaatatccccagttcttcgctgatcacggccataatgaaatcagtatgcgcctcaggcagataattcattttttcaacactgttcccaagccctcttccgaaaaatccgcctccggaaatagcaaaataggattgaatcagctgatagccgtccccgttcgcatcaccaaacggattggtaaaggaaacgagacgcttcacacgataagaagcggaaaatgcgagataaacgacccctgacaccgccgttgcgccgagcacgaacaaatggcgttttttcaagccggcacataataaaatcgaaccgcacgccgccaggattaaggaagccgtccctaaatcaggctccgccaatgtcaagataaaagcggtccccaaaatcactaaaggcggcagaacccctttcacaaattgatgaatgtacggctgctttttcgtataaatcgaagcgaaatacaaaatcatcgcgatcttcgccaattcagacggctgtacgacaagcggccccgctcccagccatctgcgggaaaaattccgctccagcccgattcccggtatcaacacgagcagcagcaataacagcgatccaaccacaaacagcggtacaagccgcgcataccgcttatacggcagacaggcggcaaataaaaataagcatattccgatcagtaaagaggttctttgtttatggaagaaataggatggatctccgtaccgctgagatcccatcacatcactggcgctgtacaccattaacaagccgaatccgcaaagcagcatgatgacaaacacaagcggcagatcggcgttttttaaacgtttcagcaacggacaaaactccttcggctattcttttccctcatacttgacgcacagcaatacagtcacgtttcaatctgtttacttttttatgattatttttaataccaattgtgtctcatagaaaaaagcattacactgttcatataaaataaagataaaaggtgatatttgtgaattacgaactatttaaagcgatcaatggtttgtcgcaccatagcgccattctcgactctatcatggtatttataacggaatactccatttacgcctatgcccttttcctgcttgccatgtggctgttcggaagcacaaaaggcagacaaaacgccctgtatgcgggcttcacgggtattgcggcgcttatcgtcaactatctcatcacaaaagtctatgtcgagccgcgcccctttgtcgagcatacggttcatacgctgatccctcatgccgcggatgcttcttttccgagtgaccatacgacaggcgctttagcgatttcaattgcgattctgttccgcaacaagaaactaggctggccgctggtgattttcggcctgttgacaggcttctcaagaatctgggtcggccaccattatccgattgatgtgctcggaagtattattgtcgccctcgttgtcggattcctgctgttcagattttcaaatgtgcttcgtccgattgtcgatctgatcgtgcgaatctacgaaagtatcgttcataaaaacaaatcgacaaaccataatctataaaaaaaagccggcgtctgtcacagactgccggtttttgtatgtttggccgtaagcttttttctttgtaaagcacagaatgcggcagtgccgagaccgtcaatcatcacatcgcggaggcatccgtttcttccgaaaaagagctggacgatttctgtcaaaaacgcggcggccaatgcatacagcaccgccttcttcatgctcctgcgctctctgaaaaacaaataggtgagcacaaaaaacgaaaacgcgtgcccgagcttttgaatcgccgcttccggtatggccagctccgccaaatcgaacacaaagaaaccggaaacatccggatggggcgtgaaacggaaggccaccgtctgcgtcacaatcatatcgtgaaagctttcagtcaaagcagaaatgaaaacaaagacgagccatcccgccgccagacatttattcattcagcatctcctcgttttctaccagtataaaggcacatgcggtaaaatgaaaagcgcctatcagagctgataggcgcttaaggatcacagttacttgcctgaatctttcattgaaccgtcatctttaccatctgtcttgtcttttgtgccgtcttctttaccgccgggtttttcctcggtttcttgtttaggcgtcacatcttttttctcggaagactgctgaatggccccttccgtttcttctgtcacagcgtttttctcttcagccgccgctttttcaatagatgttaccggtttgtccataaagttcagcgggttcatcgctacaccgtctttgcggatttcaaagtgaacgtgatttccgctttcttcactgtaaaggttttttcctgattttccgatgacttggttctgctttactttgtcgccctggtctacgctgacttcagataaagactgataaacagtagacaggccgtcagagtgttcaatttcgaccacatagcccagcaccggatctttagcagctttaacaaccgtaccgctcagagaagcagaaacatcaaatgattttccgtctttctcagctaagtcaattcctttacttaggctgtacgtgttattatagttaacaagtgctgcttctttctctttttttgcggcattcgtttcgtaaaactttttcacaacagaaacattttcagaatgagcagccggcattgcgacgttttccattgactttcctacttcgacggcatcgtctttgccgttgtcatacgcggagtttcctccgttattcgtcagattgtccttcacatcatttgaaacggattgataccaaaggacagctgttaaaatgacggccgcactgactaagtagattgcagggaatatccagcgtttgcgaaagaaccgctgaagttttttgacttgagaagttttcttttcttcctctctcatttgttcatcacctcagcaacattctgaacacttttctgaaaatatatacacatctataaaaaactttttggaagtagtatgtgcagattgctcttaattatgtaataaaatgtgaagggagatcccggaatatgaatttaaccctgcgcaaagccgtttcggaagatttagatgcggttgtggccatatacaactcgacgattgcctcacgaatggtaacggctgatacggaagaagtgacgcccgaagaccggatggattggtttttgcggcacacggaccggcgcccgctgatggtcgcggaagatgagaacggcaaagtggcggcctggatcagctttgaaacgttttacggccgtccggcctatgacaaaacagcggagatcagcatctatctgcatcaggattgccggggcaaaggagcgggaagctttttgctgaaagaagccctggcgatcgctccgaaaatcggcatccggaatctgatggcttttatcttcggacataatgtgccgagcattaagctgtttgaaaaattcggctttactgaatggggcgtattcccgggtatcgccgaaatggacggaaaacgatatgacttgaacattttagggagagaactgtcatgatcagcatcgataaagaaaaagacgaaaatcagccgctcaataaaaaagcccgttcccttgccgacattgccaaatggggaaaaatcaccgccgtgtttcttatcattacgggctctctgtccgctctgtcagccatagtgacgctgctcggagctattccgggggttttgctcatcatttccggcgtcatgctgatgcgctcggcaaaagcggctgccgcccttcaggaaggcctggaagaaaacgcggaagaaaatatgctcgaacattacgcatcctttatcaaaatgcagtttttttacgctgtatccagtgtggcattgggcattatcgcttttattttagtcgccatcttcgctgtcatcggaattatggcttatcacagcaccgatacgtatgacacgcctgattcatattactatgagaacgacccggtgtttgaatgacaaaaagagctgatcacgtgtcagctcttttttaatacagcatttcttttttccggtcttcttccgttaaaaattcaataaaactcttcatcgcagacggctcctccgcaatcaatcgggtataggcgcttttccgttcctcggacagaatattgctttttctgattctgttgagcatatacagacggatcgttttttgcacctgtttccgctgatagccggcttctttaaaaaacgcaagacccaaggccgcaaggagcgcaaaaatgccggccgatacgaaagctcctctcccggaaggggcctgaatcaaaagcgatgccagatgaaacagagaaaaagcggcgagcgggaaagcaagaaaacggtaaatgatgctttttttcatcagcggtgtgatggcgatttggattttctgaatttctttttttatgaatcccggcaattgttccgcatgttccagcttcataccctctcccctttgctgtcatttttgtcttctttttcatatatgcttattttaccgcacccggaactttctttgaaagaaaactgcatccatctttgattccggctctttattctttcaaaatgtcaatgttataatttgaaatgggaatcagattgctgcacttgtcggaatactaatgggcacagtcttgataaatatgatatagcggggttgcaaagtgagcatttcatttattttattcggattttttttcattttaaatatacttctggccatcatcatgattttcaaagaaagacgcgatgccagcgcttcatgggcttggcttttggttcttttttttattcccattttagggtttattttatacctcttattcggccataacctgagacgcaagcacctgtttcaatgggaagaccgtaaaaagatcgggattgaaaagctgctgaagtctcagctgaaagacctgaaatcgaggcaattccaatttaacaacagggcgactgtggataataaagacctcatctatatgcttgtcatgaacaaccacgctgtctttacagaggataattcagttgagattttaacggacgggcgcgataagttcaaacgcttaatgaaagacatttccaatgcaaaagatcacattcaccttcaatattatatttataaaggtgatgaactgggaaaaaaattgcgtgatgccttagtgaaaaaagcacaggaaggtgtaaaggtcagagtgttatatgatgaactcggttcgagaacgctcagaaaaaaattcttcaaaccgctgcgggacgccggcggccatgtggaggtcttttttccttccaggctccgtccgattaatttgcggctcaattatcggaatcaccgcaagctcgtgattattgacggcgaaaccggatatgtcggcggctttaacgtcggagacgaatatctcggcctgaacccgaaattcggctactggcgcgatacgcacctcaggcttcagggtacggcggttcacgccattcagacaaggtttatcctcgactggaaccaagcctcccatcaccatacgctcacatacgtcccgaatcattttccggaatgcgagccgaaggggaatgtggggatgcagattgtcacgagcggaccggattcagagtgggaacaaattaaaaacggttatatcaaaatgatctcaacggccaaacggtcgatcctgattcagacgccttactttattcctgactcaagtcttttagacgctctcaggatcgcttgcctgtcaggcatcgacgtaaaaatcatgatcccgaacaaaccggatcacgctttcgtttactgggcgactttatcttacatcggagatcttttgaaagccggggcctcggtctatatttacgataacggctttattcatgcaaaaacgattgtcgtcgatgatgagacggcttcagtcggtacggcgaatatcgacgtcagaagcttcaggcttaattttgaagtcaacgcctttatttatgacgtcaccatcgcgaaaaagctcatttcctcatttaaagaagatctgctcgtctccagaaaatatacgtatgaagaataccaggagcgttcactgcggatccgcatcaaagaatcgatttcaaggcttctgtcgccgattttataaactttaattagctttctttctcctttaaatagatgtgtataatcattacacttgtgattatacactcatttaaaggttttttattagaataaacaaccaaattaccatgattattcacacatattatttcacaaattaaaatcacaccgtttatagaattagaataaacattgattaatttataatttatagtaaaatatttcataaaaggaggaaagtctcatgaaaaaaatttcaatgttattttcggttattgctctttcactaggccttctgagtattccagttggcaaggctcaagcagctacaggcccatggactgaagttggaaaaaaaggctgtaaagttagagtttgggttgacgcctatacatattctaaaaaagcatctacaattgattggtatggagaaactaacggtaaatgtggaacattaaattatactgcttaccttagagtctcagagggtgcttcacaatatcaattaaaaggctcattctcaaaaagaactcctacaaaatcattctctatcaataaattaaggaaagaacactttagcagaaaacgagttgcagttacacttaatataggatcttatgaagtacaatcacacactataactgttaactggtagcatcttaaataccctttttggaactgtcttttttcagattctaactaaaagatatttaccgctgatagagtcaaccttttttgcatctttctcggctatttttctttaaaaagtagataaataactaatatgatagtaacagctttttcagttggttattaaagaagtccatcagcgatttctattttgtttaacagcaccctttcaaagacggccattcaaggtagaaacggacacatggctggaaaaaacacattttatattcaaaagaatggccgaatagtgtataaatgaaaagtgagtatttttttgtaaaggagtgccaagttttgaaacctgaatcagtgaatcgttcgcttatttctatttcgaaatggggaaaagcgacaggtattttgtttattattatgggcgcatttgctgcgctgtccggcgcgtttttcttcttaatcggagccattccaggcgttctgcagatcattgccggcatttttctgatgcgctcggcaaaagaagcgggacagatggcggagcagttcaatgaactgacagaggaacatatgctggagaattacgcaaagttcgtgaaaatgcaggggatctatctcattgtaacaatcggcttgtccgttctctgcatcgttctcttcattgtacttatgacgctcggcatcgtggacggcgtatttgataacattgatgccaatacatattaaaaaagaaaatcccggcgcgtccgcccgggatttttttcttattccgcttctccgacaacggtaaagcgctcgttttggtgctttggattttccaattcatccaatacggcaatggcataatcggcgtagctgatatagctgtcgcctgcatcattgacgatgagtgtgtctttgccttttttgtatgctcccgtgcgttttccgttcggatcaaacattgccgccggactcagaaatgtccaagaaatagactcggtgttttcaaggtcttgtaaatttttcgcctgctgaagcgctgtctgcagatattctttcggaaattccggcgtttcagccagacgtgttgtttttgcttcatcaacaaagaggctgcctgctccgccgacgacaaataatgttgtatcttttgcttccttgaaaatgctgattagtgcttttcccgcttcaacatgcagatgctccttgcccgccggcgcaccgaaggcgttgactacggcatcaaatggctttatatcctccgccttcaaatcaaagatgtctttttccacaaccgtgacatcttgatcttttacgtttgatgcatttctgacgattgccgccacctcatggccgcgttccttcgcttccttcataatagcgcttcccgcttttccgcttgctccgataattccgattttcatgttcttttcctccttatttgtaactattattgttacaactgtggcggcatgaagccatctctttttaacaaaagagatgattcattacatcataaagggacttgctcgccaattcattctccattgcccgctgaacgcttccgaacgtctcatcaagcgcacgctgaatatttttgccgaccggacagtccggattcggattgtcgtgaaccgcaaaaagctcttccttattctgcaccgccctgtaaacctccaggagggtaatctcagacggatcttttttcaggctggctcccggaacacccgcccgggatgtcagaatacctgcttttttcagctggctgatcgttctccgcactacgacgggattggtgtttacactgcctgcaatcatatctgatgatgcccgttcatccgttgagatcagcgatagaatgtgaatggccacagcaagacggctgttaatcatgtttttcaccaccgttgtaaccataatagttacatttcatttgtttgtcaactattaatatacactaaatcacgcgggaagatgaaatcaagttggcaacagaggtgtaaataggccggcgggaaaccggccggagatggattaaaataagaaataacgctgtccgagcggaacatagctgacgggctggcatgccagctcttctccgtcggcgaacacctgataggttttcggatcgacttgtatattcggcatcgcatcattcagcttcatgtcgagcttactcagcttacggatattccgtacgggagaaatcattttttcaagcccgagcttttcaggtacgccgttttcgataccggcctgggacataaatgtaatagaggtattgcggttcgctttaccgtatgaagcgtacatctgcctcataaacacaggctcaggcgtcggaatggaagcattcgggtcccccatttgggcgcgggcaaccatgccgcctttgagcacaagttcaggtttgacgccgaagaaaaccgggtcccataatacgaggtcggcgagctttcctttttcgacggaaccgacttcatggctcaggccgtgggtgatggccggattgatcgtgtatttggcgatatagcgtttggcgcgtacattgtcattgccgttttctcctgaaagagcgcctcgctgctttttcattttatcggcaacctgccatgtccggataatcacttctcccaccctgcccatcgcctgcgagtcagatgatgtcatgctgatggcgccgatatcgtgcagaatatcctccgccgcaatggtggccgctctgatgcgtgaatgactgaacgccacgtcttccggaacttttgaatctaaatgatggcagaccatcatcatatcaagatgctcgtccatcgtgttgacggtatacggaatcgtcggcgtcgtagaggacggcagaatattggcgtaagatgcgagtttcataatatccggtgcatggcctccgccggctccctctatgtgatatgtatggataacccggtcgccgatcgcatcaagcgtgttttctaaaaagcccgcttcattaatcgtgtctgtgtgaatcgccacctgaatatccgcttcatccgctacttccatgcaagttttgatggcgcttggcgttgttccccaatcttcatgcagcttcaggccgatcgcgccggcttctgtctgctcaatgagaggcgctttatcagaagcattccctttccctaaaaacccgacattgatcggaaattgctcagccgcctccagcattctcgacatgtaccacgcgccggatgtacaggtcgtcgctttacttcccgtcgcagggcccgttccgccgcccagaagcgtggtcacgcctgaagaaagcgcgacttccatctgctgcgggcagataaagtggatatgcgtatcaacgccgccggccgttacgatttttccttcaccggaaatgacttctgttccggcgccgatgatcatgtgcgggtcgaccccatccatgatatccgggttgccgcttttcccgacgccgacaatccggccgtccttcactccgatatccgccttgacgatcccggtataatccaggacgacggcgtttgtaatgacaagatcaagcgccccgtctttccctgtgatgcggccgttctgccccataccgtcacggattgtttttcctccgccgaaaatcatttcttctccgtaattcgtgaagtctttttcgacctcgatccataaatccgtatctccgagtctgactttgtctcccgttgtcggtccgaacagttctgcgtattgctcgcgtgacattttcatcggatcgcttcctccatccatccggcttttttaagatttgacagagtcttctctttaccccgctcatccatatacgtatcggccattccgttcaggcctctgaccgtttttcttcctccgatttccacgagcgtgacggttttctcttctcccggttcaaaacggaccgatgtgcctgacggaatgtcaagacgcatgccgattgctttctcccgattgaaggacagggcgccgttggcttccgcaaaatgaaaatgcgatcctacctgcactgaccttgttccgttattggtgactgacacctccagcgtctttcggccttcgttaatggtgatggtcccctttgcgacttgaatggctcccggcttcatgacttcacctccgctttgatcggctgatgaacggtgacaagcttgaccccgtccgggaacgtcgcttccacctgaatgctgtccagcatttccggaacgccttccataacgtctttttccgttaaaacggtgcggccggattccatcagctcagcaacgctttttccgtctctggcgccttccatcaggtaacaggtcaaatatgcggcagcttcaggataattcagcagaacgccgcgctctttccgctgttttgcgagctctcccgctgtgaaaataagcaatttttcttgttcaaccggtgtcagtttcatcgtattcccccttttgatagtcaaacgcaatccacatggtcataccgaaacgatgcaggcggttaccacccccttcacctcatgaaatgttaagtgataaaagttattcgacggcgaacagcctgattccttttgcagaaattcccgatttgttatttttttcttaaacaaacgtttaaccaaatgtgaagaaaggtcacattctttgtgaatattataaagaaattatcgtaaaatttatagaatatttaaaaagttagtgaatattaaccaaacgaactggaaattttgtcatttctcataacaaaaagcccaaaatgttttgggcttttgcagtgtttccatttcaaattaatcgtcactgagtttatctttcgttttgccgacacccttttgcaggctgcctttcgctttgtcttttttaccttccgcttttaagtcggtcttgtctgtcatgtcaccggctttgtcttttgcttcccctttcattttgttcatgccgccttttactttgtcttttaaaccgttatcttgactcatgatctcttcagctccttttgttcttgtgtacttgttttcttccctttcagcccgaacacaaacatgtaaactctcaattattgatttcacagcgttctccgtagcggatcactttgtaaacggccaatccgtctgacagcttattctccccatattggaccggaagaagggcaaagaaaacataataagttgaaaaatagacaaattggtaaaaaaataagtttggctcaaagacatcttttatgatcagcagatttattaaaaaaatagaagcgagattaaacagacagcctccggaatagacgagcgcgctcgtcagacggttatctatccgcaattcgccgaacttgcagaaagaatctataaagtagatacgcctaacctgaatcggccctacttttacaagacgtttccccattccgatatccaatgacgccttgcctccgaacagcatcgccataaaactgtggcctgacacatggatgacagacaccatcggcagaatgatgagaaatgatacgaaaaactttatcatatcattaaatccgaacaacaaatccctcctttccatcgttcttttttccctcttttgcgatttttccgattttttctaagatcaaacgtcataatgtgcataaaaaataaccacctgccgatcagatggttaaagaaacttatatatcgtataaacattgttctttttgaatgttttctctcatgcgaatcgcttgttcataaaaatacgccgcttctttatattgcttatgggcgcttgtgtaaatggcggcctccaaggcgaaatcttcaatatacacatacagcgattttttattcatataatcaaacacttcgtggattaagtccatattgagggattccagataaagcgcttgtaaaaacttatatttctctaaactgaatcggtcgccgcgttctttcgcgatcataacccctctttcataataggcaagggccgcttcgtcatcatgcagcctgaaaagggtgtgtgttaagctgaacagcgccttcggaagctgttcaagctggtgctcctcaaaaacgggaaccgcttttctaaagtaacgggccgcttcatccagatcgcgcttttcagaataacaattccccagattgtaaagcgaagacccaatcagacggggctgtccttcaagcaaagaaaggcggagcgcttcatctaaatgctcgagcgctttgtcgtagtttttgcagtcgatatagtttcctgagataacgaaatggcattgaattctccgcactctgtaaaaatcgtgttttacatatgtatccagcgcctgaatcccgtgattcatggaaaaatgagtctgtttcatgacataaaaaacttcagacatcttaaaatggaattccgccctctctatatcatcctcgacaaatgaaaggagtttttccgctttcctgtaaaaagaaatagctgcaacatagttattctgatcgaattcatacatccctctgaacaaatggaaataatactcagacagtcccgatatgctgtccgtgctttcgatcgtcttttgcagctcgctgtactgaatttgtgattgttcggtaaaatccggcttgacgtaatcaagcataatatgatggcggtagctgatcagctgataatacagcagcagcagctggtcttcctccatccgttgtatatcctcatcaatttcctctttcagctttatggcatcagccgcttgaaacgctaaaatgtgcttgtaccatttgttgatcttgactccaacctgagatgacggaatctcgtatgcggtcatgcccctttcacaaccttttctaatttctattggttatattttaacatattgtatggatttggaattgaataacttgatcgtcctgcatcaaaattcctatcatatatttcggccggcatcggtattttttgaaccgctcagcttcttttgaataaaaaagcctgcccttgttcgggcaagcttcattatccgcctatataagacatttccactttctttttcccatctgttttagaaagcgcgcggtcaattgaatactgatccgtgcggtttttccagacagaagcgatggactccgtcaattcgtcatcggtcaggccgccgcgcacaagcttcctcacatcgtagcctgcggaagcgaacaggcacgtaaacagctcgcccctcgccgacaggcgcgctctgttacaggaggcgcagaatgcatctgagacggaggaaatcacgccgatttcgccagatccgtcaagatagcggaacctggaagcgacctcgcctttataattcgcttctatcggctccgtcggcatgtgctgattgatcagatcaatgatctcagccttcgtgatcacgtcttttttgttccattgattcgtattgccgacatccataaattcaataaaccggagaatatgacccttttctttaaaatagcgggccatcggcaggatgtctttttcattgacgcctttttggacaaccatattgattttaacaccgagtccggcctcttttgccgcctctatgccctcaagcaccttattcaccgagacgccgcggccgttaatagccttaaaccgctcatcttctaaagaatcgagactgacagtcacgcggtgcagccccgcctgcttcagcttttccgcatacacgggaagcagtgagccgtttgtcgtcatcgcaatatctttaagccccgggatgcgcgcaagttttctgatcaattcaggcatatcttttctcatcagcggctccccgcccgtcagcctgattttttcaacgccgaaacggccgacaaacagtttcgcaagccgctcaagctcctcaaatgagagcaattctgtcttttgtaaaaatggataatccggtccgaatagttcggctggcatacagtacgtgcatctgaagttgcagcggtcggttacagagatacggagatccctgagcggcctgtcccttttgtctgacacccggcgcgtttctgtattcataagcccaagacccctttctattgttcaacccgttcaggatgtgtgtatacattaaatgacccgtttctgacaaagcctatcgccgtgatgttcagctcttccgccatttgcagcgcaagctccgtcggcgccgattttgaaatgacaatcgacacgccgatttttgcggcttttaataaaacctctgaggaaatccggccgctgaaaacaatcagcttgtcacggacgggcattccgtttttcaaacagcagccgtacagcttatcgagcgcgttgtggcgcccgatgtccgtcctcatgaagagcatcttttccgtatcgcacagcgccgcattatggacgccgcccgtttcctggaatgtgccgcttccgctttgcatctccttcatgaggtgaagacacgtctcaggagttatggtaatgcggctcacggcggttttggccgtttttacatcctgctgaaagtaaaaatggcggcctttcccgcagcatgaaccgatgactctcttcgtatagtctttttgctcgagcacttcgggattcgtcagctccacatatgcaaatccgagactttcatctatagtaaagcttttgatctctttttcaaaacgaatgacgccttctgatgcgagaaatccgactacgagttcctctaaatgatcaggcgtgcagacgagcgtcacaaattcccgcccgttcaccatgacagtcaatggatactctgaaaccatccgatctgccgtttttgttaatacccctttttcatagcggtatatttctcttaccgctgttgttttttcatccactgttttcccctccgcagtatccttctcttttattcttccacaatccctgtattttgtcgaatttgcggtttaaaaaaagagccctcttcggactctatgtttcgttgcggtgatgtctgctcaacatggtgaataaaataacggcggcgataatggccaatatactgacgaatatgaaggcggcaagcttcagaaaaactcccaatagaacaaaaacgactgccgccagcactaatataatgcctgctccttttaacaacagcggtcatctccttttagtcgtatcattcccgcggttccgttttctaaacaaaaaagacgccgctcgggcgtccttttttaacctattcttttgctaaatcctttgcagcgtcttcccaagcctgtttgaactcggccgcgctgtcagctgagacatatgtgccgccccctgcttccgccgctttttcaaggctttcgcttcctttcatgccgaagttgaaaccgatgatattgacgatcgtgttgacgttcgctttacggagcttttgaatttcagcctgaggattaccgccgcatgtttcttcaccgtctgtaatcagatatacgacgtttttccctttagcgccggcccgctcaaattcttcacgtgtatcagaaagcgcttttgcaatcggtgtccagccggtcggtttaatctggctgagcgattgctcaaacggagtcacggcgtacggctgaaggccgtataacgtttctgtcgcattacacgatacggctttaccggagtttttattattgcccttatgaccgaatacccggagcatcagattagtgtcttcaggaagaactttcgcaaaagaggtgacagaatctttcgcgacatctattttacgctctccccctgttttttgtatcatgctaccgcttgcatcaaacagcacagcgacgtttgtttcctcgtgctttttctcagccgcaaaaacaggtgatccgagtgaaagcgtcaaaagtccgacaatccccgcagtaaacatttttttcatttccttcattcctctccatttgtttttcgccgatgggccccggctcttctctatgctagatgaggaatatgcaaaaagatatagggcgggatgccttttgtgtgagcggcggtacatcgtcaaaaatgaacagaattatgcgcttcatcctagaaagattggataaaagatgacagatttaatgcctttttcgccctttttgtaatataagtccggaatctgattctttttacagttttctcttcatttcttcttgaaaattttgttaattcaagcgtaaaaaaaagggccgaaaaacggcgccttttcttattcccctaatgaactcgcttctaatttaaagatacggttcatatccttttgactgtgagcttcgtaatattttcctccgcccgctccggcaatcgcgtgaagctgaccgttgaagccttcattaaagtcaaagccgattacattgactttaatatgctgtttgcgaagctctttcgctgtcttaataggatctcctccgcatgtctcctcgccgtccgttaacaggtaaacggatttactgccgagtttgtgcacgccgttaaaggaagccttcgcatcctctaatgcctttgcaatcggtgtccagccagtaggcccgattccgttcagagaattaaggaagctttgtttgtcaaacctttggaatccgtatacaccgcgaatagattcacaagactgaacttttccggagtttttattattgccttcagaaccgaaaaccgtcattctgacctgtgatttagatttaatttgatccgcaaaacggacaatttcatcttttgccatgttgtatttagaaacaccgtctatccgtttcgccatactgccgctcgcatcaagcaaaatggcggtattgtttttaggtttaaagaaagaattctcgtttgcattctcagcagcaaaagcaggagatgcagcagtcagcagcaaaccgaacatgagtatgagtgaaaatgtttttttcattgcttttccccttttcaatagatttccgttcaacgtcgaacactatttatcgtaaatgagttgaaaagggaaataaataggacggggttcctcattatttttgcgtacattcacatagaagcggcatttttatcagtgattttcacccggtgcgcagccatctatccgcatttgtcagcctttagcctttcgttatatgagtccgttggttccttagccgtttatggaatagttttccgaaaaaaagacgctgatgagagcgtctactttttcgccatatatttgcttaaaaatgaatctgcctcggaaatatccactccctgataataatgcttgacgatgtccgtcacggattttccctgctccgccatataattggcaccgtactggctcatgccgacaccgtgaccgaatcctttcgtcgtaatggtgatgctgccgccgtttcgtttccattcgaagtcggcagaacggagtccgagtttttcccgaatgtctcgtcccttcagcttcttgccgtttatgacggccgtcgccacttgatgtcccggcgttctggccgtaatctgccctacagtgtcttgtcctgcgagctgcacaccgagcttctgctgaaactccggcacactgaaagtccgggtggcgagatattttggcgattttttatcccatgggcttttcacgctctttaaataaggaatggcgcttgtccaataggcttccgcattttccgtatacccattgcttgtagagaaaaaagatgcctcaatcggcttgttttcatacgttaaaatctttccttgcgtaccggccaccgcgtttgtgattttcttgaggttttgcgcgtaatcagaaccccattcttttttcagctggcttttgctttgatagacttggaacatttgcgtgtcatccaccagtgatcctttcggggcctggacggctgagtttgcaaccatcagtctgacgatgaatgtacgggcagcgagcgcttgggcttttaaggcctccggtttaaattctacgggcatttcggaagccacgacaccgatcacgtactcttcaagcgggatgttttctacagaatgattggatgtccgataaaccggaacggatacaggtgattctttcaatgttggttctgctccttttgtttctcgtatggtgtgtgctgttttgtgtccgggctccctgtttacggctgctcctttttcggcctgaaacggaaggacgagaatggtgggaacaagaagaataagtacacacagcccggatagtagaaatacaatgggtttcatatatcagctgcctcctgcttgggattcgactctacttcatcttatgggcagggacaagctaatatgacttccttttggacagattcttttattcgattatttacgcgaaaaacgtattcttttttggaattcagagcataataatgatgataaaccatataaaaaaacagtatgccagattgacatactgtttttgtaaccattatgcgtttaagtcagtaacggcttctttactttcttgttcagcggccgtttcatcgacaacacgctcgatgtcagcgccgagagcctcaagttttttatggaaatccacataaccgcgatccaaatgcttcagttccgtgacgcgtgtatgaccttcagccactaatcccgcaagaatcagcgccgcgcccgcacgcaggtccgtagcggcaacttctgcgccttgcagctgtacaggaccgttaatgatcacagaacgtccttcaattttaatgtcgccattcatccggcggaattcttcagcatgcataaaacggttttcaaacacagtttcagtaatcatgcttgttccgctcgcacggagaagcagcgccatcatttgtgactgcatgtcagtcgggaatcctgggtgaggcatcgttttgatgtcgatcggcttcagctgtgcaggaccgatgacacgaaggccttctccttcatccgtaattttgacgcccatttcttccatcttcgcaattaaagacgtaagatgctcaggaaccgcaccttttactaatacatttccttccgtgatagccgcggccaccataaaagtacccgcttcaatacggtcaggaatgatgttgtgtcttacgccgcgaagcttctcgacaccttcaattttaatggtgcctgtgccggctccgcggatttttccgcccatcgcattgatatagttcgctaagtcaacgatttcaggctcttttgccacgttttcaagcgttgttgttccttcagctaatgcagctgccataatcaagttttctgtcgcacccacacttgggaaatctaaatagatttttgcgccctgcagacggccttccacttctgcttcaataaagccgttgcctactttgatttttgcacccattgcttcaaaaccttttaaatgctggtcaatcggtcttgagccgattgcgcagccgccaggaagcgctactcttgaatgacccgtacgggctaacagagggcccataacaagcactgacgcgcgcattttacgcacatattcaaaaggtgcttctgtttctaaagcgtaagaagcgtttacggtaacttcattattctcaaaatgcacatctgctcctaaatgacgcaacacttcattaattgtatatacatcggagagcgtaggtacatcacatattacgcttttttcttcacttgctaataaagatgcagcgataacaggtaaaacggcattttttgctccttcaactttcactgtgccgtttaacttctgaccgccgcggacgatgattttttccaaggtattcccctccgcgtccctatattctctatattaatattcagttgtcacgattggtgtgccaaccgtaacggtatgtttttcgcccattcccgcacttctaagcgcaatttgcacattcatcttatgtttcgatgtcatgatgtaatctgtccacttatatgtaaatgcagaaacagaaacgaaatgaggctcaactacatgttcaactggacttgcttcaaattctttcatgagctgttctgcttttttttgcaaaacaatactcatattatcatttaaatgaccctttagacaagtaaaaataaatactttattttgaaatatgtcatgtgcctgccgttcaaactgttcatatgtatcattccagttttccggttgctccgggctcatttgctcatataataaatacgaagttgggttctggtttttgagggtagtgacgagctgcagtttaaaagttgtgtgattttttttgtcagaatatgtgccgacggcctttacgattttatcttcctcggcggtttcccaatgatactgcggattttgcgccttcagttctttcaccttgtcatcaaattcactcagtgacaggttcagattttctttcgcatgaagcgtccactcatcaacagtgacatcctgccgctccattccttcggcaatctgggcaagcggagacagctcactcgcatgaatggaatgaaataccgcaattaaggcgcttaaaaaaacaaaaaacaagatgatacggcctgctctttttttcttcatatcgatctctcccccttactcccatttttgccggagccggggaaagcgatacatggaaaacttcgtcaaaactcgccaagcgggtgaagaaaaattggtttctcccccagcgattcccttcattacaactgacgaaacttcttaaaacaagtatggaagctgcttcgaataggtaagataatctaaaaagaagttggcgactgccgttccgatcgcaatggtaagaagaataatcagcagccgtgcctgcactatttttccttttcggatcagcggatcaaagttgacggcctgaagcgcccaccatgtcaccgcaatgcataccaagtgaatcaggatgctgattgcggcctgctgccccaatacattcacaaattccatctcctttcattttttccgcccctcatatcctctcttattatataagaagaagagagaaagatgatcatttttacagcagaatttttatccaaaattaggggcaatccccgcttaaatgtccgttctccggcatggtatacttttttggaaaggagatgggaatatgaatcattccttttttcatccggaaaagcagtatggggaaacactgcccgtatttgaccatgagtgggaagcgattgcattctactatgattatagacagtctcaaacagaggaactgaaagaattatgtcagtttttcaacatttctcttgattattcacacggcagcctgcaggaattggaaaccctttacttccgcagcattaaagagctgctgctggcggattggaacctgccgattgacgaatttgagaaaatgctcagcgtgtatgtcatcgattgcgccatcagacaccatgacgatgccgaatggatcgtcaaaccttatccgtacacggacggcgcctatacgacaggtgtgcgaagaggaaacaaaacgtggcacaccgacaactgctgtgagcatttatatctgcaaaaagaagaggatcatccgcttatcggcgtctatgaatctcttatgcgttaatatagaaaaagaatccttctcagatagccgagaaggattcttttttagtttcctgcaacatccaatctgtttacagcccgctgtaacgcaagctcagcccgacgaatgtcagtatcatctgatcgtttgtttaaacggtcttccgcccgctttttcgcagcaagggcgcgctctttatcaatgctgtccgctgtttcagcggcttgtgcaaggatagtgacctgatcaggacggacttctaaaaatccgccgctgacagccgccaaatcggtctgtccgtcttttttaaggcggacagcgccgattttaagcggagccacggtcggaatatggcccggcaagataccgagatcaccgctctcggctcttacactcaccatttcaatatcagcatcatatactgggccgtcgggagtaacgatattgactttaacggtcttcatgcttttaccctcctaggaccagattaaacttctacacccatctcttttgcattctcaataacttcttcaatgcgtcccacaagacggaatgcatcttccggaagatggtcatatttaccggaaaggatttctttaaagcctcttaccgtttctttaacaggcacgtaagaacccttttgtcccgtaaactgctcagctacgtggaagttttgagaaaggaagaactggatacggcgtgcgcggtgaacgacaagcttatcttcttcgcccaattcgtccataccgagaatcgcaataatatcctgaagttctttgtaacgctgaagcgttgactggacttcacgcgccaccgcataatgctcttctccgacaatttccggagcaagcgcgcgggaagtggaagccagcggatcaaccgcagggtagatacccatttcagttaatttacgctcaaggttagtcgttgcatccaagtgagcgaatgttgtcgccggagccgggtcagtgtagtcatcggcaggcacgtagattgcctggatagatgtaactgaaccaacgtttgtagacgtaatacgctcttgaagctgacccatttctgtcgcaagcgtcggctgataaccaaccgcagaaggcatacggccgagaagcgcggaaacctctgaacccgcttgtgtgaaacggaaaatgttatcgataaagaacagtacgtcctgtccttgtttatcacggaaatgctcagccattgtaagacccgtcagtgctacacgcatacgtgcgcccggcggctcgttcatttgtccgaagaccatggctgttttcttgataacgcctgaatcgctcatttcgtagaaaaggtcgttcccttcacgagtacgctctcctacaccggcgaatacggaaataccgccgtgctcttgcgcgatgttgttgattaattcctggattaatacggttttacctacgccggcaccgccgaacaatccgattttaccgcccttgatgtaaggagcaagcaggtcaacaactttaattcccgtttcaagtatttcaacctcagttgaaagctgatcgaatgaaggagctgatctgtggatcgggtccttttgagcatccgcaggcagcggttcatttaaatcaattttatctcccagtacgttaaatacgcggccgagagtaacatcaccgacaggaacggaaatcggagcacctgtatcaacggcttccattccgcgctgaattccgtccgtagatgccatggcaattgtacggactgtatcatcgcctaaatgaagagcaacctctagcgttagatcgatgcttacttcattttcgcctgaagctggctgtgaaactttaatcgcattataaatcgcaggcaagtggccgtcctcgaaacgtacgtcgacaaccggtccaagcacctgacttacgcgtcctttcttcatcgctatccctcctgacaaaatctttctattctaaagcggctgcaccgccgacaatttcggtaatttcttgtgtaatcgccgcttgacgcgcgcggttatatgaaagcgaaagtgaatcaatgagttctttcgcattatcagtcgcatttttcattgctgtcattctcgcagcgtgttcacttgctttactgtcaagaagcgcaccgtaaattaagctttccgcatattgaggaagcagcacttcgagcacctcttcttcatccggttcgaactcgtaagaagccgtgcgcttcccgccgctcgttccgaaatccgttaaaggcagcacttttttctccgtcacttcctgtgaaatcgcactgacgaaatggttatacaccaaatgcaattcatcaaaagcgccgtcgataaacatttgaaccgtctgacgggtcaaatctttaatctgagcaaaagtgacctcgtcgccaagccccactaactcagacaaaatcggcatttcccgttttttgaagaaatcgcggccgactctgccgattgcaatcaccgtgtattcatctttagactgatggcgttcttgaatggtgcggtaagcgtttcgcagaaccgaactgttaaacgcacccgcaagcccgcggtcagacgtaatgacgagatacgccgtctttttcacttctcttgagacaagcatcgggtgtttcgcgtttttcgcgccttttccgacgttaaacacaacctcctggatcttatccatatacggagcaaatgacttcgcgttggtttccgcacggttcagcttcgcagcggataccatctgcatggcttttgtgatctggcttgtttttttcgttgacgtgatccttgacttaatatcgcgtaatgaggccaaagatttcaccacctttattcttcatttgcgtaaaaagagagaaaaagagaacctttttctctcatcttctaagggttagttgcttggtgcaaatgtgcgtttgaagccttcgattgcagctttgaagtcttcatcagcaggaaggtttcctgttttcgcaatgccgtcaagcagatctttatggttttgatcaaggtacatgtagtactcttcttcaaaacgtctgatatccgcaaccggaatatcatcaagatatccttttgtcagcgcataaagaatggctacctgtttttcaaccggaagcggcttattcaagtcttgcttcagcacttcaactgtacgcgcaccgcggttcagtttcgcctgagtcgcctggtcaagatcagatccgaattgggcgaatgcttcaagttcacggtatgaagcaaggtcaagacgcaatgttcccgctacctttttcatcgctttgatttgggctgatccgccgacacgggatacggataatccggcattgatcgcaggacgtacgcctgagaagaataggtcggattgaaggaaaatctgtccgtcagtaatggaaatgacgtttgtcgggatataagcggagatatctccggcttgtgtttcgacgaacggcagcgccgtaattgatcctgcgccttttgcgtcactcagcttggctgcgcgctcaagcagacgggagtgaagatagaatacatcccctgggaatgcttcacggcccggaggacggcgaagaagcaatgacagctcacggtaagcggccgcttgtttggataaatcatcatatacgacgagaacgtgcttgccgttgtacatgaattcttcacccattgtcacccctgcatacggtgcaaggtaaagaagcggagccggctgtgaagcggacgccgtcacgacaatcgtgtaatcaagcgcgccgtgcttacgaagtgtttccactacgccgcgtactgtagattctttttgaccgatcgctacgtacacacagatcatgtcttggtctttttggtttaagattgtatcaatcgcaacagatgttttacctgtctggcggtccccgataatcagctcacgctgtccgcggccgatcggaattaacgcgtcgatcgctttaatacccgtttgcagcggctcatgtaccgatttacggtccattacgcctggagcctggctttcaatcggacgggttttgcttgtcaggatcggacccagtccgtctaccggctgtccgagcgggttgacgatacgtccgattaattcttcgcctacaggcacttccatgatgcggcccgttcttttgacctcatcgccttcacggatatctctgtaaggtcctaagataacgatacctacattggattcttcaaggttttgagccatacccaaaacgccgtttgaaaactcaacaagttcaccggccatacaattgtcaaggccgtgcacacgcgcaataccgtctccgacttggatgactgtacctacgtcatgaacttcaatttcagattggtaattttgaatttgctgctttatcagcgtgctaatctcttcagctttgatgctcacttaggtttcaccccttctatcgatttcctccggcaagttgacgttccatgcgctcaagctttccgctcacgcttccgtcataaatccggtttccaatgcggactttaatgccgcctattaaatccgtctgcacttcatttctgattctgagcgaagcgattccggctttttttgcaaatacttgagataatgataacatttccgcctctgacagcggttttactgaataaacaaccgcatcctctgtctgacgggcctggtttgcaagtttaataaactcgtctgtgagatcaggcacaatcgaagaccggcggcggtcaatcagaagaaaaatcgtatgcagcacagactcagacagtgcgccgaatgattgctgaatcagctcttttttcttagcagccgataccttcggatggcttaacacttcctgtaatccggcttcgtttcggaaaacttcttttagtacggtaagctcttcttcgatttcattgatttgagaagtctcaacggcaatgtcgaaaagcgctgacgcgtatcgtttagagacagcagatccactcatcggctttctcctacctctttaagatagtcctgaatcagtttttcctgggcttgttcatcaagctctttttcaatcactttcgatgcgattaagacagaaagtgatgcgacttgctcgcgaagtgcggaaaccgcttgttctttttctttgacaatttcggttctcgccgcttcttttaatctttcagactcggcgcgcgcagcctggataatgtcttccttctgcttttcacccagctttttcgcattttcaatgagtgattgtgattcctgtttcgcttcttttaaaagaacgcgctgctcttcaatcagcttctgcgcttctttatttctttcttcagcggacgtaatttcgccggcgatatgatcttcacgctgtttcattatatttaatagcggtccaagagcgaatttcttgagaagcgctaataaaactaacatagctaacaattggaataggatatctccgccgttaaacgaaagtcctaattcaagaggtaattgagacatctactacggcaactcccttctgcaggttttctctgctgataaaaagccgtttcaagccggcctgcttatcagacataaagcaatggcgaaggttctcttagagtgatcttcgccatttttagttcatataaggcttttttgcttagccaaagaacgctaagaacgcgataacgacagcgataattggaagggcctcaactaatgcgatacccatgaacataagagttctaagttcttttcctgcttccggctgacgggcaattccctctaccgtacgtgaaacaatcaaaccgttaccaatacctgcaccaagtgcacctaaaccgattgcaatcgcagctgctattaaattcatgaaaaagttcctcctttaaaatgttatccgaatggatatatgattttaatgatcatgactgattttgtgtgacatgtacaccatcgtcagcatcgtaaagataaatgcctggatggtaccgatgaacaagctgaatgcctgccatgcaagcatcggaataatggctccgactgtgccgaccaaaccgagaaagaaactgtttgagtagaaattcgtcgccagatttgcaagaaggcccagaagaatttccccggcgaaaatgttaccgtaaagacgaagtccgagtgtcagcgtattcgcaaactcctcaatgatcttcatcgggaacataagcggaaccggtctgagataatccttagaatattccttcaagcctttcatcttcacgccgtaatagtgcgtcaatgacactaccataacggccagagtcagggtaatagccggatcagccgtcggtgatttccaccaaagctcgtgtccgaccgttacagaaaacggcagccccagcatatttgatacaaatatgtacatcagcaaggttacaccaagcgccaagaagttagcccctgtctttaaatccattgtactgcctataatattgcggacaaaatcaacaatccattccatgaagttctgggcttttcccggacggatggacagcgttctcgtagtaagaatcgcaatcagcagcacaatcacacttgccacagtaatcatcagaatgtttgtcagattaaaagtaagaccaaacaaatcaatagttctgtaatcgtgattcaatgggttttcacctctcttccattgatgaacgtttgagctgaataatggaatctatcataatgacgggataaattgtcattaatccaataatcacacttgccacactgactttgtcgggatatttaaaggcgatagccatcgcaagtatcgcattgcaccaacgcgctgcgctcccgagtgatcgtatggactttcctttcgccacggccttgtcaaaagcattcattcttctggtcaagagccatagattaaacaaactgaaaacagttcccaaaaagaggcctaaaaaaacagttttatacgccgtaagaccatatcccagcaaatagattgctaagatcacaaatacatatctccgttgtctgctgaatgtaagattgggatcgtccatcaactatctgtctcctgatgaaaatgtaatataattcctggatacggcaatacatgcggttaacccttgcagaaggccttttttgtcccgcaaaaaaacggcctgttcgaaaaaaccactcatcctcctggtgcgggatgctgtttcattcgcttagataaatcctcatgtaacgggtttttttgggaggatttaaaatgaggatggatactagaaatgaaaggaatgaaaaccttctcataataccctcgtttagcatacaatagcccctaacatgtgtcaatctgtttaaagttaaaaaactttttataccgaaagcatacacagaatgttcacaaattcacctataactgtatgaactctccccattcagcaaaaatctggataaaaaaaagaaaacctctgaatgaggttttctgatttattttgttccgtacagtctgtcacccgcgtcaccgagacccggaacgatatagcctttttcattcagtttttcatcaagggccgcgatataaatatcaacgtcagaatgatgtttctgcagctcttccacgccttcgggggccgctacaagacacataaaacgaatgtttctcgcgccgcgctttttcaggctgtttatcgcttcaaccgcagagcctcccgttgcaagcatcgggtccacgacaataaattcacgctcttctacatcagaaggaagcttgacatagtattccaccggttttaaggtttccggatcacggtataatccgacatgtcccactttagccgccgggattaatttcagcatgccgtccaccattccgagacccgctctcaggatcggcacaataccgagttttttccctgaaatcactttggatgtcgctgtttgaacaggtgttttcacttccacttctttaagcggaagatcacgtgtaatttcaaacgccatcagtgatgcaacttcgtccacaaggtctctgaaatcctttgtgcctgtatcttcattccgaatatatgtcagcttatgctggattaaaggatgatcaaatacgtaaacctttcccatactgtgttcagctcctttttgttgtccgagtgactttttcacacttctattgattctacagaaaaagacaaacagtttcaagaaaatcataaaaaaacccgccggatcagggttccggcgggtttcttccttattaatagtccagttctttatataaaggaaacttctcagtcaaggcagacacacgctgtctcgcttcttcaagttttgcttcgtcttcatgatttttcagcgcgaggccgatgatggcgccgacttcttcaagcgcgtcaccgtcaaatccgcggcttgtcacagctgccgtaccgagacggattccgcttgtgacgaacggtttttccggatcgtaagggatcgcgtttttattagatgtaatgccgatttcatcaagaacatgttcagcgacttttccggtcagaccgagagaacggaggtcaacaagcacaaggtggttatccgttccgcctgatacgagctgaatgccttctttgttcagagattcagcaaggcgcttcgcgttcgagatgacgttttgcgcatatgttttgaaatcatcttcaagcacttccccgaaagaaacggcttttgccgcgataacatgcataagcggtccgccttggatgcccgggaaaatggatttatcaatttttttgccgaactcttcacggcaaaggatcattcctccgcgcggtccgcgaagtgttttgtgagtcgttgtcgttacaaagtcagcgtaaggaaccgggttcggatgaaggccggccgcgacaagacccgcgatatgcgccatgtcgaccatgaagtaagcgccgacttcatcagcgatgtcacggaattttttaaagtcgatcgtgcgggggtatgcgctcgctccggcaacgatcagtttcggcttatgcgccagcgctttttcacgcacgtcttcataatctatatattgcgtgtctttatcgacaccgtattcaacaaagttgtattgaacgccgctgaaattaaccgggcttccgtgtgttaagtggccgccgtgggagaggttcatgccgagcaccgtgtcgccgtgctctagaatcgtgaagtaaacagccatgttcgcctgagcgcctgagtgcggctgaacgtttacatgctcagctccgaaaatctctttcgcgcggtcgcgggcgatgtcctcaacgacatcaacgtgctcacagcccccgtagtagcgtttgccgggatagccttcagcgtatttgtttgttaaaacagagccttgcgcttccattaccgcttccgtcacgaagttttcagaagcaattaattcgatcttagtctgttgacgcttacgctcatctctgatggcgttaaacacttgtttatcttgtacaggtaaatgtttcatcagcgaaatcctctcctatccgtttcctgttctttatttttaccacccttattgtacatggtttttcaggtgaatgtaacagcttatttaaaaaaatcacaatatttaattagaaaacacgaacgttatataggaaaagtattttcatcattcgcattcataaacagcgcgaattccgccgatcagcttcggccttgtccgggccatcgtcacatgcgcttctccgagctcacggcttgatacccggacagggacggcgacgggttttaaatgcataccgatgaacgtatctccgatgtcaattccggcgtcggcctgaatcgattcagcgagcacgggagattgcatctgccggtatgcataagaagccatcgctccgcccgctttggggacggggacggctgaaacaatgggaagcctgaaccgctcggccgtttccgcttcaatgacaagcgccctgtttaaatgctcgcagcattgaaaagcaagatgcacacccgttttttccttgaaccgggcaagtccgccgtaaatcaattcagcccagtccccgcttccggcggtgccgatccggcttccggcggcctcactcgtactgcatccgatcaccagcagactgccgtccgtcagtccggcctgctcttgaaactcagtcagcatgtccgtccatttttgcttcatctcttccattgtccagcacctcttacagatttttttcttcgtaatctgcgattttgccgatccgccgttcgtggcggccgcccgtaaattcagtcgtcagccagatttttgcgatttcgcgcgccagacccgggccgataacgcgttctcccatcgcaagaacattcgtatcattgtgttctcgcgtcgcttttgcgctgaaagtgtcatgcgcaagcgcacagcgtattccttttaccttgttagcggaaatgctcatgccgatgcctgtgccgcaaattaaaattcccctgtcaacttcgccgctcaccactttttccgctaccggaaaagcgtagtctgaataatcgaccgagccgccgccgcattcacagcccatatcaatgtattcaatctgcaattcatctaaaagactttttatttcttcgcggatatggacgccgccgtgatctgacgcaatagctactttcattcaatttacctcctaggtgtggctgggcgaagacagcccagtgtgcttgtcctttttttacgaaatccgttgatttcattctactctttcacattcgttttgcaaatgacctgtttgcagattttctgacaggttacttgcttttgccgtcaagtaattgatcagctaaaagggtcagcagctcctccagttcgtcccgcgtctgtttataaacatcaagcgaaccgccgaacgggtcagagatatctccgtttgtccccgttacgtattctttaatggtaaatactttgccctgactgttttgatatctgctttcgatcagctgtttatgctgttcggtcatcgccagcaccagatcggccgtctcgatatgttcttccgataagggagatgaagtgtgattgagagcgatccgtttttcaaacagcgcttccacggcatgtgccgacgcttttccgtgcggagacgcgaatactccggcagagcttgcgctgacgtccagccctttcgttactgcaatggatttaaaaagagcctcagccatgggactgcggcacgtattgcctgtacaaacaaagattattttcatatccgtcacctcttactgcctattataaatgaagaaaaaagaaacggcatcttcgtttctttttttacgtatcttatatcggtaaaagcagtttcagcccgaatccgatcaaaatggctccgccgagcgcttcgctgtaagagccgagccacgactgcacctttcttcccgccaaaagacccgcccatgttaaaacggtgctgaaggctccgaacagcacaacggccagaatcggattggaaccgttcattccgaggctgagcccgacagaaaagctgtcaagactgacaccgaccgcgaataataacagtcccgagcctgccggagatatgagcggcccgtctgattgtttaaacgcggcgatgatcatttgcacccctaaaatgaaaagaagagacccgccgatgtaaacagcgagcatccccagaaaaccggacagcagatgcccggccgccattcctgccagcggcatcatgacatgaaacagtccgatgacaacccctatatgaaaaatctgttttttcctcatctgaatcatgcccattccgagcccgacggaaaaagcatccgtccccaaagcaaatgccatgatgcttaaggagacaagctccccgatgaatagattcgacatgaaataaaaaacccccttggacgtgcccgcttgtttagcttatgcatgtccgataaggggtagaacaagttaatggataacggtgccgcctgcggctttcatcagcctgttcataacggcgagccccactccggtatccggaaaggattcagaaataatcatatccacttccgcttcatcaaagctgcggagcgcatcgtataaggcggacgccactgtttcaaggtcggcgcgccggccgcagaccttaataaaatcagcctggtaactatcggcgttctcttctgttgtcaggatgccgattcgttttccccgccttttatattcgtccgccagctcttgaattctccgggcgccgccgtcagcaacagccaggggcgcagaaggcgcgtaatgtgtatatttcataccgggagaaataggaacctcatcctcttcggtcagtcctttatccacaaggaccggaccggcggcagattcaatctgctcttttgtcacaccgcccgggcgaagcagcacaggctgtttccccgcacaggaaagaacggttgattctactccgatccccgtcgcgccgccgtccacaataccggcaatgcggccgtttaaatcatgagccacgtgctcggccttcgtcgggctaggttttcctgataaattcgcgctcggggctgcgatcggcagtccggccgagctgatcagggctaacgccaccggatgatccggcattctgacagctaccgtctcaagtcccgcggtgacacggggtgacagcaccccgggcttacacggcaagacaagagtcagcgctcccggccaaaaaagcttcatgagctttttcgccgtctcgggaacatggctgataaaacgatcaagctggccgatgtcagatatatgcacgatcagcggattatcgctcggtcttcctttcgcctcatatattttcgttacggcttctgtattttcagcattagcgccaagtccgtaaacggtttctgtcggaaaagccacaacttcattctgccggagcaattccgctgcttgtgtaatctggggatcagttgtggataattctgcggaagaatccacaaaccatcttcttgttttcatgtataaccaaactccttattttaaagcggtaaaactttattttctctcgtgtattccttttgaaagtataaaagatgtccttaaataaaacaagtgttatccacaaactgtggacaacacttttcaataagtggataactttgtgtataagtaaggttaggcggtggttttcaccattaaaaacgaaccctctgtgcataacgaattgcggaaatgctcggacgtatacagttcatcaggcacatcggcgcatgtttcaaatcccatcacagtcagaaattcagcagatgagggctggttggcgactaagtagacatcttgaatttcatgttttttacacagcacatccatactttgaaacagcgtcacgatatggctttggttcagcctgtccgacatgacgagtgaacgaagaagcccttttccgccgctgaatttttcgatcccgagacaggcggcaatctttttttcactgtcctccagcatgataaatcggctgatctgctgatcgatttcagcatgtgccgtatcggcctttttcaaaaaagcctccagcgcttccgtatcttgatctcttgccactctcagctgataaaacatatatttccctccgtttcgatcaactctttcttccaatctatgaatcgaatccggatttatgcctttttgcttcaggaaaacagatctgaaatccaatcgacgaggaaaaacttcacttcggttttatcgtcatccttattttctttcttcgctttatcagcctttgcttttacgtcatccatcactttttctgtctgtttcttcgtttcttcgtgcttctgtccgccgtcttcctggtctttcactgcttcaccgtttgagaaatcaaggaagcacagcggcggaaacaagacacaccaccagttggcgccttcaccattaccgagtgtaattaaaatcgcttcatattttccggccggatagaccatattgccgtaaagctttgtcggaaacgagattttattgaatgcaacggatacggattgatgtgcacccttttctttcatcgtttgtttggcgatttctttaatttcagggagcttcgaacgaatgaggcggcgcgcttcttcaatggaagtgatatctttcacccagcccgtgatttccttgtttacagcatctctgatctggcgcttgagcttttgatcctcatcgttatcactgttggccaaaatcctaagccggatcgcttcatccggtatgacaacgggctcattcgctgatgcccgtgccgtttcttcttttgtcaaacccgcaagcgctcctgataataaaagaaaaatatatatgcaaatcatcattgtctgtttcatcggtccccaccgttcctctccgtgcttttttgtctagtctcattatggacatgacggaaaaggtttaaaccggcgggaagaaaaaaatctagcaagctgataatctgcattgacagactcagaatatggtacgatattattttgataggagggttttcagatgaaatataattacaccgtgctgctctcagcggcatgtatgtcggtcatttattcaattttgtacgttcatcaattcattattgcggctttcatttcgatggcgttttattttttgtttccttatttaattttcgcgctgccgcttcaatactttctgaataaaaagccgaagagatttcacccggtgtattttctttattatttaggggcgtcatttgttgcaaacgggctcatcttcggccttttgcagccgtcaggccaatctttgttttctaattcagccttttatatctttgcggttttaacggctatcgtctattgggtgtgggattccgtattgctgcaaagacaaagcccggctacagaagcgtaatcagcagacagacggctgaagacagagcggcgcaaaagaaaacggcggccatcttcacacgggcgtgccgtccttcttttgtttcagaatgatagttggcccgctgctccgctccgcttacggccagcccggaaacaatgatcgccgtgatgataagaacggccgtaacggcaccgaatatgacatcaaagtcaaacggcagaacaaatcctgccgcataagctgcggcggcaagtatacaaccggaggcaaacgcttttttcaaggcggatcccctttcattttctttccattgtaacaaaagcccgccgtgtacgtcaccggcaggcttttttcatgatttgatgaccgccgaaacggttctgtcttttccgttgatgtcctttacgacttccacttccgcattcggaaaggaatgacggaacaggtcttccacggcttttccctgattatatccgatttcaaagacgacaagcgccttatccttcatgacaagaggcaggtcctccataaaccgcttgtagaatttcaaaccgtcaccgccgtccgtaagggcatgaagcggctcatggaaacggacgatatccgataaatcagccatctcttcttcagaaatatacggcggattggaaacaataatgtccgctttttttcctgacgaaataaaaggagttaacaggtctccctgcaaaaagcgcacgtccgctccgaggttttgcgcatttctttccgccacttgaagcgcttcttttgaaatatccgaagccgctactgaaaaatgcccgcattcaagcgcaagcgtcaccgcaatggctccgctccccgtaccgatatcaatgacgttcaggcgttctccctcggaaaacacccgtttctgtttgtccagcagatgaaagacgacttcttccgtttccggacgcggaatgagaacatcgtcattcacaaaaaattccctgccgtaaaactgttctttcccgataatatattgaatcggaacgccttctttatgcatttccacatgccgtctgaatcggtaaagctcgtcctcgccgacgggctcctgcagatttgcgagaagcttgctccgatccattccggtatcatttaacagcagcagctcggccgcgtttttttctcttcccgcttcagttaaataagaagaagcccagcttagggcttcaaaaatggtcttcatcttaattttccgcctgctggagcttgcttgactggtcttctacgattagcgcttcaaccacttcatcaagcttgccttccaggatctgatccagcttttgaatcgtcaggccgatgcggtgatccgtcacacggttttgcgggaaattgtatgtgcggatacgttcggaacggtcgcctgagccgacggctgatttacggttttgatcgtattcagcctgagcttcctgctggaatttgtcatagactctggcgcggagcaccttcatcgctttttctttgtttttgatttgtgatttttcatcctggcaggatacgacgacacctgtcggtaaatgcgtcaggcgcacggccgacattgtcgtgtttacgctttgtccgcccggtccgcttgatgcgaatgtatcaacgcggatatctttttcgtggatgtccacttctacttcttccgcttcaggaagacacgccaccgtcgccgtagatgtatgaatgcggccgcctgattccgtttccggtacacgctgcacgcggtgcgccccattttcatatttcagcttggagtacgcgccttttcccgtaatcataaagataatttccttgtaaccgcccgttccggttacgcttgcttccatgacttcggtcttccagccttggacttcggcataacgggagtacattctgtagagatttcccgcaaacagcgcggcttcttctccgcccgctgcgccgcggatctccatgatgacgtttttgtcatcgttcgggtctttcgggatgaggagcactttcaaacgctctgataaggtttcagtctctctctgcaattcggagatttcttccttcaccatttctctcatatcggcatcaagcttatcctcaagcatcgcttttgcatcggcaagctgttctgatgcgtctctgtattgtctatagacttcaacggtttcttgtatatcagattgctctttcgaatattctctaagctttttcggatcgttgaccacttccggatcacttaaaagctcatttaatttttcgtatcgttgttcaattgactgtaaacggtctaacacggtcttcacctctgttttcctgtgcgtaacattctcattatagtatagggtttatcgccagtcaaaagcaattcgcctctgttatactgaagcaaaaaaggaggagcggatatgctgaaatccatccaccatatagcaatcatatgctctgattatgaaaagtcgaaagctttttacaccgagatactcggtttcggcattatgaaagaaacataccgaaaggagcgcgggtcttataaactcgatctggcgctggacggcgcgtatgtgattgaattgttttccttccccgatccgcccgaacggccgacccgccctgaagccgccggtctccggcatcttgccttcactgtaaacgatcttgaagcagcagtccgggaattaaaggaaaaaggcatcgaaacagaaccgatcagaaccgatccgctgacggggaaacgctttacctttttcttcgatcccgacaagcttccgcttgaattgtatgaagcgtaacgttttttgaagaaatgccgctttctttggcgaattccttcttgttttgtctaatgtgaagggaacgccgcctcatggtcgaatacctagcaaaaaaggaggtatgtgatcatgaatacaaacatggccgcgaaagaactcggcgtctccgcaaaaacggtgcaaaggtgggtcaagcagctgaatcttccggctgaacggaacgagctcggacattattcttttacgtctgaggatcttgatgtgctgaaatcggtcaagcagcaaatttctgaaggcactgctcttctggacgttcaagtgccccggcagccgaaaaaacggacgggctttattttgcagcgctcgaaaatcaatggcggcaccgaacaaaggctggcggagctggagcgcaaactggatgttctcacgaaagagaaacaggacgggaaccatctgctttcaagaatagaagagctggaacgccagctgaaacaaaaagcggatgaaggggtctcatatcagcttcttcagcacaggcgggaaatcgacgacctcaatgccgaattgcagacattggcctcccgcacccaggaacttgcccagacagctcccctctcagaaacagccgcttcttcagaacataagaaatccagaaaaaaaaccagattttcaccttttaaatttcaattctaatcaaaaaagctccctgaaacagggagctttttattatgcggtcagcgcaatgatgatcggcagtgagatcaaagataaaatcgcactgattacgaacgcagacgcagtttcttcctcttgtttttcgaaacgtgtggcaatcatcgccgctaccgcagatccagggaatgcaacaagcaataccgcttttgtgatctggtcagccggaagtccgactgcaagagcgatcaggtacatcagtgcaggctgaacggcaacttttaacaaagcgataccgaaagccggcagactgagcttaatgttgcggataccgacagttacaccgacggcgaagagcgcaacacctgatgttgtgctgccgagctgttcaagcattttgtcgcccagctcaggaagacttacaccgaaaagcacaagaatgatactgataagcggtgcagccgcaagcggttcggaaagaccgtgaagaatagacttaccagtcattttccagaagctttcattttcattgtcctgtttcttagatgactcaccgacagtagcgataatgatcgcaagcggatcaagcatggcgttaaccacgatacccgtaacggcgataggaatcgctacttcgtttgcgccgaacaagcttccgagtacaggaatacccataaacgcaaatgtcggctgtgctgagtttaaagaaaagacagatgaattcgttaaatcatacttaaagataaatttgcataccagcaaaatgacgatatagaatccgacgatcccgatgatcaaagcgatcatcaaaggaatctgtgttaaaaacgcacttcttgaagtggttaaaatgctggcgataaaatgcgccggaagcgcgtacttcgtaactaaggtgcttaccccttttgctgacttcgcgtcataacttccgaagcgacctgcgaaccaacccagcacgatcacgaaaaagatcggtgccaggaggattaaaatatctaagaagctcaaaatgttctcctccaaatccttaatgtccgtatactttagcctttagataaaagctttccctcggactgtaaaattaatcgtacaaattatttagctacaacttgtttatattgcggtttccacattgcatcaagaacggcttgttccacattttcaggaatgcggtttgccacgccttctttaattgcagtttccgctacggcgatcgcaactttaattgaaacttcttgtaagtcgctcatgctcggcagaaggcctgcacccggtgtttcaaaatcaacgctttctgcgattgcgtcagcagttgccgcaaacattgcaggagtaatcactttcgcttctacaacgattgaaccaagaccaagtccagggaacgcgaatgcgttgttagattgtccgatttcatgagaaacgccattgtactcgacattgtcaaacgggcttcctgtcgccacaagcactttaccgtcagtccatttgaaaagatcgctaggaacggcttcagcaagcggtgtcgggttagacatcggcatgatgaccggacgctcaacgtgtttagccatttctttcacgatttcttcactgaatgcgccgctttggcctgatgtaccgattaagatagtcggtttcgcttgacggatgacttcaatgaaaggaatttgtccattttcatcgcgtttccaatctttaatttcttcagctgtacgcaggtacggctgttggaaatcaagaatgttttccatgccttcaatcagcaagcctctgtagtccattgtgtagaacgctttgttggcttcttcttcagaaagaccggcaagcaccatagtgtcgcggatttggtcagcgattccgattccggcagatcccgcaccgaagacaaccacacgctgatctttaatagacgcgcctgttttcttcatagccgcaagaacacctgcaagcgtaatcgcaccagttccttgaatgtcatcgttgaatgtaagaatttcgtgattgtatttcttcatgatattgcgcgcgtttttgtttccaaggtcttcccagtgaagaagagctttagggaaatatttaagcgcagcttttacataagcgtcaatgaaagcttcgtaacgttcgccttggatacgttcatggcggttaccgatgtataaaggatcgttcagaagtttctcgttgtttgtaccgacgtcaagaacaacaggaataacacggcttgggtcaataccggcagcagctgtgtatacggctaatttaccgatggcgatgttgataccgcctacgccccagtcaccgattccgaggatgctttctgaatctgtcgcaacgatcagatcaatatcgcccgcagtggcatgaagattttcaaatgcttcttcaattccttccacattgtcgatagaaaggtaaattccttgaggtcttctgtactcatggctgtattcttgaatcgcttcaccgacagtcggtgtgtaaacaaccggcagcatttcacgaagatggttttgaagcaatttaaagaaaagaacttcgttacggttttgcaaatcgttcaaatacacgttttggcgaaggcggtccggctgagcctgaaactgctcgtatgcgcgttttgcctgctcatcaagagacagaattgtcggaggaagcagcccgtctaatccaaggctttttctttcctctgctgaaaacgcaacacctttatttaaagtagggatagatagaacttcttttcctcttaaagtagtttctaagttgccttccttcgttactttaatattattcaagaaaatctccttctttcttcaaatagttaacaaagttaagtaattacccgttttggctagtgcgatcgcgatctgctatatctttttttgacaattattcgaacaatgtctcataactatttacattacttagtcattttatgcctgtaaaaatgaaaattcaagagatgaaaattacttaattttttcatactcttttttaaattatttaactacaatttttgaaaaaacgataaaaaaacaccggatttttttccgatgttttcatgaaaagggttatttatcagtctgttttttcgggacttcgtgatgatgtctgcatctcgcttcgtatgactccgacgcgccgactaaaatgaccggatcatcataggaagcgggcttcccgtcaattaaacgctgcgtacggcttgccggtgacccgcagacagagcagaccgcctgcagtttcgttaccgattcggcaaccgccatcaggtccggcacaacgccgaacggctctccccggaaatccatatcaagtccggccgcgatgacacgatagcctttatcagcaagcatggataaatcatcaatgattgattcgccgaaaaactgcacttcatctaccgcgatgacgtccgtgctttcactgatatgatcccatatttcagccgaggacgagatgacgtggcttgtcatggatgtgccattgtgagaaacgacggcttcctcactgtagcgattatcaatggcaggtttgaacaccttgacttcctgcttcgcatatgtcgcccttttcactctgcggatcagctcttctgactttccagagaacatgctgccgcatatcagctcaagccatccgctttgcttcattatgtacataggctatccgctccccttttttcctgtttatagacataaaaaacaggcaagaagcaattcttgcctgcctgtaaaatctattattacttaagaccgtattttttgttaaagcgatcaacacgaccatcagcagaagcgaatttttgacgtccagtgtagaatgggtggcattcagagcaaatctcaacgcgtacctcttcttttactgagcctgtttcaaattcatttccgcaagcgcatttaactgttgcttttttgaaattaggatgaattcctgctttcattgtatccatctccttccgccctgaatcccgtgtggaaacagagttattattccggattgaatccggaacgcatatgagagaattatatcagtcatttactgcatttgcaaatacattttttatcagcggcgggctgatgatgaaaggtttgcctgcttccattcttggttgatcagatcgaagaattcctgattcgttttcgtttttttcatttttctcataaacttctctgcgaagtccggagaatcagacatcgatttgcggatcgcccataaacggtcaagatgctctttcggcacgagcagttcttccttccgtgtgcctgagcggcggatatcgatcgccgggaaaatccgtctttccgcaagagaacggtcaaggtgaagctccatgttgcccgttcctttaaattcttcatagatgacgtcatccatccgggagcccgtgtctacgagcgccgtcgccaaaatggtcaggctgccgccctcttcaatgtttctcgcggctccgaaaaagcgcttcggacgatggaatgcagccgggtcaataccgccggaaagcgtacgtccgctaggcgggatgacaaggttgtaggcacgcgccaaacgggtaatgctgtccatcaggatgataacgtcttttttgtgttcaacgagacgcatcgcccgttccagcacaagctcagctaccttgatgtgattttccggcacttcatcgaacgtcgagctgacgacatcgcccgctacggaacgttcaatatccgttacttcttccggtctttcgtcaattaagagaacgatcaattcagcgtcaggctgatttgtcgtaatgctgttagcgatttcttttaacagcatagttttaccggctttcggcggcgctacgatcagaccgcgctggccgaatccgacgggagccatcatatcgagaattcgtgttgagagataattcggtttcgtctcgagcaccatttggcgatccgggtaaagcggagtcagcgcaggaaaatggactcgctctttcgcagattccggatcatcaccatttaccgcttcaacgtgcaaaagtccgtaatagcgttcgttttctttcggcgggcgcaccttgccggatactttgtcaccgtttcttaaatcaaagcggcggatctgggaagcagaaatgtagatgtcttctgagcttggcgagtaattaatcggtctgaggaagccgaatccttccgattggatgatttcgagcacgccttccataaacagaagatcctcctgctcggcgttggctttcagtatcgcaaagattaattcttttttggtcagtttgctgtagtaggagattttataatgtcttgccagttcgtatagttcttttaatttcatattttccaaagaggaaatagatacgtctttcataaaaacaccacgcttttcatagtcaatgtattgctgttttcattcaaaatcggctgctttgcatgattccgccaaagcacattcttttataaaacgttcaggaacttctatcggtaacacttccacccatgatcggcgctttttttaaaaaaggaatgtcttaatgagttttgaaggaagcgaggacaaaaacttgagaagatcaatatttatatcgtctgtatgcggtagaatttgaaaatttcccagtactcaaaagaaggaattacacagaaaaatcgcagcactctttatttttacctcattttaaaaaattattcaacttaaataatgctttgacatataaatgatagggttgactcttttttgcaaaagaaaagcgggacttcccgtcccgcttttctctatttatggccggatgacaagatttggtttcttcttcaggctgtgccttccgtcaacgaatcggaccgttcctgatttcgcccggatgaccagactttcggtcgtgccgacggagcctttgaactgaacgcctttcaaaagctctccgtccgttacgcccgttgcggcaaaaatggcgtcgtcacctctcacaaggtcctccaaacggagcactttggacacatcaaggcccatccgctcacagcgggcttgctcttctgcactttgcggacgaagcctgccgatgatttctccgccgagcgcttttaacgcaacggcagacagcacgccttcaggagccccgactgaaccgaaaagaatgtctacgcccgtatggtcaaaggccgtattgatggcgcccgcgacatcaccgtcattgatcagtttgatcctggcgcccgcctcacgcaattcagagatgattctttcatgtctgtcacgatttaaaatggtcgccacgacatcttcaatgtctttgtttttcgctttcgcaacagcttttaagttatcaatgacaggagcttcgatatcgatgcagcctaccgcttcaggtccgaccgcgattttttccatatacatatcaggagcattcagcagtgttccatgatcagcgaccgcgatcaccgtcagtgcattccagccgccgctggctacgatgtttgtgccttcaagaggatcgacggcgacatcgacgcggggcccgtatccgtttccgagcttttcgccgatgtaaagcatcggcgcttcgtccatctcgccttccccgatcacgaccgtgcctttcatcggcaccgtgtcaaacacgtcacgcattgcgcttgtcgccgcatcatcggcttcatcctttttcccgcggcccatccatctggcagatgctaaagccgccgcttcagtaactcgaaccaattccattgataagcttctttccatttcaacacgatctcctctcaaaagtccgcatttctatgaattttgcagctgttctatttcttcgtccgtcagcccttgccgccagattgtggcgcccagaccttcgagttttttctcaagattgctgtagccgcggtccaaatgctcaagaccggtaatttcggttacgccgtcagccatcagccctgctacgaccagacaagcgcccgcccgcagatcgctcgcctttacttttgcgccctgaagctcggccggaccggtgataatagccgatctgccttccactttcatgttggcgcccatccgtctcagttcatcaatatgtttaaatctggccgagtagatggtatcagtcacgacgctcgtgccgctcgctctcgttaacagagatgtcatcggctgctgaaggtcagtcgggaatcccgggtaaacaagcgttttcacgtcgaccggttttatctgcttctgcccgccgagcatgagcagctgatcatcactcgtctcaatgtgaaaacccatttccctgagctttgccgttaaagactccaggtgagtcggtatgacattatcaataatgacttctttccccatcgcggcgccggcgatcataaaggtgcccgcctcaattctgtccgggatgatggtatgcctgcatccgtgcagctctttcacgccatcgattctgatcacattggttccggcgccttttatctttgcgcccatgctggtgagcaatgtggcaacatcaataatctcaggttccttggcggcgttttctatcacggtttttccttcagccagtacagcggcaagcatgatattgatcgtcgctcccacgctgacgacatctaaataaatccgtgcgcctctcagcctttcggcgcgcagataaatcgcgccttgttcattggtgacttctgccccaagcgcctcaaacccttttatgtgctggtctatcggccgcggcccgagatggcatccgcccggcagtccgatgaccgcctgcttgaaacgcccgagcatcgcacccattaaataataggaagcccggagttttttcactttgccgttaggaagcggcatgctgatcatcggtgaaggatcaacgaccatttctcctttttcaaaatggacgtttccgccgatttctttcagcaggtcacgcagcgtttcaatatctgagatctccggaagcccttcaatcgttacttcggaatttgccagaatggttgcgggtatcaatgcgacggcgctgtttttcgcgccgctgatatgtacggttccgttcaacgggtcgccgccggcaatattcaacttttccatgatagtctccttccataagaagatagctgcggagcgtaaataaaatggcattttattctgtctctgcaaataaagctcttgtccaaaatgtagccaattcgaagagaaagaatacaaggacattataaaataacaggaagaaaatagcgaagctttgcggggcatttttaacataggatgcacagagacccgccgggtttacattccggggaactttgatattgaaggcccgccgtcaaacaggaaaacataagggtgcggcaaacggatgcaaccggtttgccgcccttttcgcccttatttattccagtctgccaagaattgctcgatgcctttatccgttaacgggtgctttgtcagctggtgaataactttcagcggcatcgtaccgatatgggcaccgcgtaaagcggcttcagtcacgtgctgcgcatgacggatggaagctgcgatgatttgtgtatcaatgtcatgaaggtcaaaaatctgtcttatttctgaaatcagttcaagaccgttatgaccgatatcatccagacggcctaagaacggagaaacataagtcgctccggctctggcggccaaaagcgcctggttggcgctgaagatgagcgtcacgtttgttttaatgttcaggtcgctcagcgcttttacggcttttaatccttcagacgtcatcggaatttttaccgtgatattcggcgcgattttcgcaagttctttaccttcttcaatcatttcttcagcgttcagggaaatgacttccgcgcttacagatcctttcacgacttccgtaatctcacgcagtctgtcatggaaagacacgtcagcttcttttgccactaaactagggtttgtcgtaactccggcaagaacgccaagttcataagcttctttaatctcgtcaatgtttgctgtatcaatgaaaaataacataaggaaagcctccccagtaataaattttcagaactgtaaaacatgattgcgctttctaaaggtaagacataaaaccgcctgtcaaagctgtcaggcggttatgggtgttacatttggattaagcttggtttgaagaaccgaactcacgcattttgccgataaccgtttctttgatcgcttcacgagcaggtccaagatatttacgaggatcgtattcgttcggcttagctgccaatgtttcgcggacagcttttgcagaagaaatttggttctcagtgtttacgttgattttagccgtaccaagtgagattgattttttaatgtcggcagtcggaattcctgtaccgccatgaagtactaacggaaggccggttgttttgccgatgtcttccatttctttgaaaccaaggttcggttcgcctttgtaaggaccgtgaacagaacccaatgcaggtgcaaggcagtcgatgccagtgcgctctacaagttcttgacactctttagggtcagcatagattacgccttcagcgataacgtcatcttcctgtccgccgacagttccgagctcagcttcaactgaaacgccgtggaaatgagcaagctcaaccactttagctgtagttgctacgttttcctcaaacggatggtgagatgcgtcgatcattacagaagtgaaacccgcatgaatcgctttcgcacaagattcaaagcttgaaccgtggtctaagtgaatggcaacaggtactgtcactttgtattcttccataagagctttaaccatggcaaccactgttttgaagccgcccatgtagcgtcccgcgccttctgaaacaccaagaataaccggggatttttcctcttgtgctgcttgtaaaatagcttgagtgaactcaaggttatttaagttaaattgtccaacagcatatcctttttctttagctgtattcaacatttccgtcattgaaactaaaggcatgtcgaaagtcctccttatgtagcctgatttgcttcttctcgaaaaaagctttccaccctatagcatgaccataaaaacctgtcatatgtaaaacaacagatcgctttttctccatctctaggataccaacttttcgacaaatcggcaacacaatgacataattgtttctaattttattaattcgattttagaggtaaatattttttcactgcgtctctgatctcatcaatgtcaaaaggtttggcaaaatgggtcagcgcgccgagctcttttgattccttaatcatatcgagttctccgtaagcggtcataataataacgcggatggattcgtcgatcattttcattcgtttgagaatttcgattccgtccatgccggggattttcatatctaaaagcacgagatcgggccgttccttcgttacgatgtccagcgcctgaatgccgttggcagcctgaaacgtctggtacccttctttatgaaacacttcattgagcaatatacgtataccgtattggtcatctacgattaaaatcttttcattcatcattttacaccccaatattatcattttcgtcaaaagtaagcagttgtttatgtattctgtttgattttcacatttcctttaattataatagtctactttccgacattttctgagcattttctcttttgttgtatactgttcttgtatgtgtaaaggaggtttcactcatgttaaagatctttacgacgcagcttgcaggcattttttcccgcattcaggataaggaatccgaagcaatagaagacggcgcgcggctgctggcgcaggcagccgtcagcggccattccatttatttatacggcgcaaatgagatgcagggcattttgtgcgaggcggaactcggctccgaaccgatgcctgccgtcaaagcgtttccggatacagctgattcgattacagaaagcgacagagtgctgatgttctgttcgagtccgggcacggctgaggaacaggcgctggctcaaaagctttatgaaaaaggcgtcggcctcgtctgcgtatctcccgtcatcaaggaccaaaccgggattgaggaattttgcgatgttcatattgacagcaaattaaaaatgccgcttctgcccgatgaagacggaacaagatacgggtttccttcattaatgacaggcctgtatatctatcacgcactgtcctttacgttaaaggaaatgatgcaggaatatgcctaatgcagaaaaaagacttgccgcttaacggaggcaagtcttttttttattacttctcttctgcagcttgtacggaagcgccgataaagtctttgaataaaggctgaggtcttgtcggtcttgatttgaactcagggtggaattggcaagcgacataccaaggatggtctttcagctcgatgatttccacaaggcggccgtcagggcttgtgcctgagaacacaaaaccgttctcttccatttgctgtctgtattcgttgttgaattcataacggtggcggtggcgctcgtataccacttcatccgcataggcttcgaaagctttcgtgtcttcctgaagcttacaagggtacagtccgagacgaagcgttcctccaagatcctcgacatctttttgttcaggaagaaggtcgatgatcggataaggagtagacggatcgatctccgcagagtgagccccttccagacctaatacgtttcgggcatattcaatggatgcaatctgcataccgaggcagatgccgaagaacggaattttttgttcacgcgcatacttggcggcgatgatttttccttctacgccgcggtctccgaaaccgcccggcacgatgattccgtctgtgccgcttgtcagctcttgaatattgctttctgtcacttcttcagcgttaatccatttgatcttcacatcggcgtcaaacgcatagcccgcgtggcggagtgattcaacgactgaaatgtaagcgtcctgaagctcgacatattttccgacgagactgattgtaatggttttagacaagtttttcactttcgtgacaaggtctttccattccgtcatatctggttctttgcactctaatttcatatgatcgcagacaagcttatcgagtccctgctcctgaaggttaagcgggatggagtaaaggttgtccgcatcttcacattcgataaccgctttcgtgtcaatatcgcagaacagtgcgattttatctttcatatcttgagaaatcggcatctctgtgcgcacgacgatgatattaggctgaatgcctaggcttctcagctcttttacgctgtgctgcgtcggttttgttttcagctcgcccgccgctttgatgtacggcacaagcgtacagtggatgtacatcacgttttcgtggccgatgtcgcttttcatttgacggatggcttccaggaacggaagagattcgatgtctccgactgttccgccgatttcagtaatgacaacatccgcgtttgtttctttgccggcacggtaaacgcggtctttcagttcatttgtgatatgcggaatgacctgcaccgttcccccgaggtagtccccgcggcgttcttttttcaagacggcagagtagattttaccggtcgtcacgttgctgaatctgttcagattaatgtcaatgaaacgctcataatgccctaagtcaaggtcagtctcagcaccgtcatcggtaacgaatacctcaccgtgctgatacgggctcatcgttcccgggtcaacgttgatataagggtcaaatttttggatagtgacgctcatgcctctgtttttcaaaaggcggcccagtgatgctgccacaattccttttccgagtgaagatacaactcccccggttacaaaaatgtatttcgtcatttcgtttgctcctctcttcggtctgcgctacattctttaaaatgtgccgttttatagaaaatcatttcactaaaaacaaatgatgtgtaaaagaatttgggagatgaaaataagaaagctccctttcaatttcttgaaagggagcgtagcactcttatgaattctcttctttttgaagagcccaaaatacatactacatagttcgacaatgaaagtcaagatcgttttgctgatatgggatcagtctttgcgatcctcgtcttcatcatcatattcttcctcatcttcttcaatcatatcgtcttcgatctcaagctcgtcgtcatcttcttcatcgatatcttcgtcgtcaaagctgtctgcgtcaaggtcaatatcttcttccatttcatcgagatcgatgtcgtcttcatcaacttcctcgaattcgtcaagatcaagatcttcctcaacggcttttttcgcttttttctttttcgcttttacagtcggctgtgtttcttcgtccagctgatcgtacggataccagctgcgaagcccccatgtctggtctgacagagcaatgaagcggccgtcaatgttgaggtcggtataaaattgggcgatacggtcacccagttcctctttcgtaacaccgagcaaggagataatttcattcagcagctcctggaacggaaccggttttttatgttctgagaaaatttcgtgagcgatttcaactaaagccatctgcttcagctgttcctgagaatattgtttgatactcaaggtcggacactccctttctattacttatatgtatctgtttctatcctataataagaacgattttgtattgttttgttcacaaaccatacctctcattataaacaaattaaaacagaatatgctacccttaacagtgtaatttaagaaattttagagccgttccttcataattcggccgatgcgcgaaaacaaagccgccggcatatgcgcgggcggcctgcttttctctataaagactcttgtttttccgcgccgaatacagacatggcgagcaattcactgacatcataagtgccgatctcgtcttcggcttctttcgctttcgtaccgtcaccgagcatggtcaggcagtaagggcagccggagctgatgaccgtcgggctgactgaaagcgcctgctcggtccgggccgtgttgattctcgctcccgtttcttcttccatccacatgagtcctcccccggcgccgcagcacattccgttttcacggcttcgctccatttctttcaattgaacacccggaatagcttttaaaatcgctctcggcggctcatacacctcattgtatctgcctaaatagcatgagtcatggaaagtaatcgtttcattcaccgggtgaagcggttttaatttcccctgcgacactagctcggctaataattcagtatgatgatagacttcggcccggaatccgaaatccggatattcatttttgaacatattataggcgtgcggatcaatcgtgacgatttttttgatcccgtgtttttcaaattcgccgatgttgtgttccgccagctcttggaacagaaactcattgcccaaacggcgcggtgtatcgcctgagtttttttctttattgccgagaatcgcaaaggatacgcccgcttcattgagcagctttgcaaatgagacggcaatcttttggctcctgttgtcataggaacccattgaaccgacccaaaacaagtattcgaactctttatcttgttttttcatttctttcaccgtcagaatctccgtatcggtctgctcccgccagttttcccgctctttccggtttaagccccacgggtttccctgtctttcaatgcttgtcatcgcccgctgcgcgtcgctgtccatcttcccttccgtaagcacgagatagcggcgcaggtcgataattttatcaacgtgttcattcatgaccgggcattgatcttcacaattgcggcatgtggtgcacgcccagatctcctcttccgtgataacctcgccgattaagctcgggttgtagtcaatggctgccgccgcttcacgcgatcctccccctgaggaagcagctgcgagctgattcgctttcgtgtgctgaaaaacgggcgcgggcacccacggagattttgacgtcacggcagcgcctttttccgtcaggtggtctctgagctttaaaatgagatccatcggcgatagcattttgcccgtaccggaggccggacacatatttgtacagcgtccgcactcgacgcaggcataaagatcaacaagctgagagcggcggaagtcttcaatctttccgacgccgtagctttcttttgtctcatcggtgaaatcgattttttccagctttccttttgaatcaagcctgctgaggaacacattcgccggacccgcaattaagtgcgcatgctttgattgcggcacgtacactaaaaagctgagcaggaacaacagatgaagccaccatgaaacataaaacacggcggctgccaccggcgctgaaagaccgccgagcacaaacgcaatcgaggaagcgatcggttcagtccaagacagagaatgatcgtgccataaaaggttcatggcgttcccgagaagcaccgtcaccatcagtccgccgataaacaggaggacaagccccgccttaaaccctcgtttcagtctgacgagtttttcaatgtagcgccggtaaaacgcccagaccacggcaactaaaataagaaacgtgacaatttcctgaaaaaaggtaaatgccggataaagcgggccgaacggcaaatgccggtcaggaagcagccctttcagaataaaatcaatagcgccgaactgaacgagtataaaaccgtaaaaaaacagaacgtggatgattccgctttttttatctttcagcaattttttctgtccgaacacattcacccatatcttctgcaagcgttctttcaggcgtttatcaaattcttccctctggccgagcttaatataagcaatcctcgttctgatcaggtaaacgaataaataaacggcgtaagcggttacagctaagaacagcagcgcgtttaccatgagaaaagcgttcatcttgtctccccctttgttctgattcccctcttcattgtcatatctttactttatcataaataatgaatgagtgttcagtcaataattaaattcggattctcggggcacactaccgatacttcggaaaggaggcgtcggtatgaaggtcttttttgtgttgcttgtcattttcattatattcatcgcacttatgctgcttgatatgctgcttggccgggcggcgtacaaaaaacaggcgtacgaacccgttttcgcgccgaaaaagagtgatatcagactcattcactgcggcggcgagcttgtgcagcaaatgacggatgatatccgccaagccgtctcttctattcatatgatgttttttattatgaagaacgaccaagtctgccatgatatgtttcatttattgaaagaaaaggcgcaggccggcgtctccgtatatctgctgctcgattgggcgggcagccgtcaagtgaaaaaaccttccattcaaacaatgaaaaaagccggcgttcacgttcattttctgaacaaaccgggatttccgtatctttttttcaggctgcaaaaacggaatcaccggaaagtgaccgtcattgacggcaaaatcggctatgtcggcggatttaatatcgcggaagagtatctcggcaaaaaagcgaagttcggaaactgggaggattatcacctgcggatgaccggcgaaggcactgcggatctccagactctttttgcaaacgatctgaaacgaagcaccggaaaaacactggaatcacccgaggtttatccgccgttatccgaagggaatatcactcataggacatatgcgtctgacggtttttcgcttgaatcgcattatgaaagctgcatccttaaagcggagaaaaacatcattatctgcacgccttattatgtaccgagcaaaaagcttcaggcagcgcttatttcggcctgccgaaaaggcgtcaaagtgactttgattgtgccaatgaagtcagaccacccgctcgttcgggaaacagcttttgcctattatcccgagcttctgaaggccggctgcctcatctaccggtattatcaaggcttttatcatgtcaaagccctcattattgatgaccgtatcagcattatcggcacgccgaattttgataaacggagcctgttctggaatgaagaagtgaatgtcatcattaatgatgagacctttactgaggaagtgctctcaaccataaagcaggacatcgaaaaatccgagctcctcaccttagaaaaagtgaaacagcgctccgtcagacagcttcctgcagaatggctgggtaaggccatatcttattttttataaaggagaaaccctatgctgttcaaattcggattcgtctcaaacgccacgtgtctttgggacgcatcccccgcaaaaaccttaacgtatgcgcgctatacaacactttccgcaagcgaacggaaagaggccctgctttctgtgacgaaagcaaatcttaccaatacgctgcgcaccatccactatgtgatcggacacggcatcccgctgtacaggttctcaagctcgattgtgccgctcgccacccatccggatgtgcggtgggattttgtcacgccgtttcgccaggagttccgcgagatcggcgagctggtcagaaaatatgatctcagaacgagttttcatccgaaccagttcacccttttcacaagcccgaaacaggagattaccgcaaatgcggtcaaggatatggcctatcattatgacatgctggacgctatgggcatcgcggatcgtgccgtcattaacattcatgtcgggggcgcttacggcgacaaacaaagcgcgcttggccgtttcggcatgaacttgaaagagctccccgatattatcaaacagcggatgactttggaaaacgatgataaaacgtatacgtctgaagaaacactcagtgtatgtgaacaagaaggcattccatttgtgtttgattaccaccatttttacgccaatccgaccgatgacgctgatttggatgacattctcccgcggatgattaaaacatggcaacggatcggcttaaggccgaaagtccacctctcctcaccaaaatcagaagcagctatccgcagtcatgccgactatgtggatgcgaatttcatcctgccggtgctggagcggttcagacaatgggatacggacatcgactttatgattgaagcaaaagagaaagaccgggcgctgcttcggctcgtcgaagaattaagcgccatccgcggagtcaaacgcctggcgggaggcgtgctgaggtggaaatcataaccaggtttatcacccgattatctggggaatttccgaaataacagaccatcagacggaggagaaaacacatgaaaaacattacatctttgaaaatagccgctaagaaattcactttaagaaacatgcttcagctttatcagctttgccacacaggaggccacgagctgtatatctactctaaaaaaacgatgtgcaaaatcaaagatatcatcgaactggaaactttcagaatggctcataaagaacaagaatatttaattgtagtggaaggaaagaaagcggttcagcttattgaccgtttcaaacatatgatcgaacctgcgcaaaaagaagcccattaaatacggatacataaaaaaaggagagacaggaggccgctcggccccgttcgtctctccttttttctttattaatgaatcagctcgccgaattgcgcctgatgaagtctctggtacatgccgccggatgccagcagttccttatggtgtccttgttcagcaatgccttctttcgtaacgacgacgatccggtccgcatccttaatcgtagccagccgatgggcgatcacaagagtcgtgcgtccttcagacagtttttgcagagacttttgaatggcggcttccgtttctgtgtcgagagctgatgtagcctcatccaaaattaagatcgacgggtttttcaaaaacattctggcgatggaaagccgctgtttctgcccgcctgacagcttcacgccgcgctcgccgatcaccgtgttcaaaccgtcgggatacccgtttaccaaatcctctaaatgcgcctgccggacggcctgccagatctcttcctcagacgcgtccagccgcccgtaagcaatgttttcccgtaatgtgccggaaaacagaaagacatcctgctggacgacgccgatttgtccccgcagagatgacagcgtcatgtccttaatgtcgatgccgtcgatggatatgacgccttcagacggctcataaaaacgcggaagcagacttgtcagcgttgatttccccgctcccgaaggcccgacaaatgcgactgtctcccccgcatgaatggataaattgatgccggacagcaccggattgttttcttcatagccgaatgacacatgatcatagcggatattcccttttaaaccgggtacatgtctcgcgtgcggggcatccttgatatcaggctccgtttccagtatttccataaagcttttaaaaccggcaatgcctctcggatacatctcaataattgcgttgatcttatcaatcggacggaacagaacgttcgtcagcagcacaaaagcaacgaattctccgtaggataatgatccgcgaatgacgaaccatgtgccgcacaacaggacgaacagcgtgacgaatcttgtcagcatgtaactgattgaaccgtttttggccatgattttatatgacgtcagttttgtcttgcggaaccgctggttgttcacgtcaaaccgctgcttttcaaacgcttcattgctgaaagcctggacaaggcggatgccgccgatgttattttcgaccctcgcgctgaaatcaccgacatctttgttcagttttgtaaacgcggaggtcatttttttattgaaatacaaagcaagccaaatgacgaccggcataatgataaaggtcaacagcgcgagctgccagttaatgaacagcatgacgccgaaagcgcccaaaatcgtcatgatcgcgataaacaggtcctcgggtccgtggtgggccgtttctccgatatacatcaaatcattggtgagcttagacattaaactgcccgttttgttgttatcgtaaaatttgaacgaaagcttttgcagatggtcaaaaagctttttccgcatatcggtttcaatgttaataccgagcatatggccccaatacgtcacaacatactgaagtgccgagctgagagcgtacaccccgaacaaagcgatagaagtcaaaataatcagactccaatcccgccccgggagcaatgtatcgataaagtaattgacaatcagaggaaaactcagctccatcaacccgcctgcgatggcagaaaagaagtcgagaaaaaacagctttttgtacggtttataataagaaaaaaattgtcgcagcacgattctgtcctccttgcgcctcgcactcaatgataatatttctcaattatactatacacaaggagtttttaaagcgttttttacaaaacgcctgaaaatagccgtgcgaaggattccttcgttctttcccataatgcgcgcttataaaaacggacggggctgattttctcagactctctcatatcctccagataatgcgcttcaagatctttgaccgcctcttgatctgtaaaaaacacattgacttcaaagttcagctgaaagcttctcatgtccatattcgccgtcccgacagaagcaaggtttccgtcggtgatgagtaccttttgatgcataaagcccttttgataggaatagacttcaattccttcccgaagaagctcggggaaataagacctcgtcgcatactgggttagaaacccgtcattggtttccggcaccatgacacgcacttggacgcctcttgcggcagcctcctttaacgccgtgcggatcggctcattcggcacgaaataaggcgtcgcgatccatacagacgattcggccgccgcgatcatggcataatacagatcgctcatccgctccttcatatcggggcctgtcggaacgacttgatagacgccgccgctttctgccggaaccgggcggctgtatgctttctgatcaataagcacctcatcagaaacgtattcccaatcaagcataaaaatgctgtggagcgtctgaacgatttctccttcgactttcatatgggtgtcgcgccaaaagccgacgtttttgtctttgctgatatattccttgccgacattcagcccgccgacaaaaccaatttccccgtcaacgacgacgatcttgcggtgatttctgaaattgaatttctggttgaaaaagccgtatttcagcggcaggaacgggacgatgttcacgcccgcgcgtttcagttttttaatatcttttccggacagcttcaggctgccggccgcatcgaacaaaaaccgcacttccacgccttgacgcgctttctccatcataatctccatcatcttgtgcccgagcatgtctgatttgaacatgtaatattcaatatgtataaatgatgctgccccccggagcgcttcaaacagctccggaaaagtttcatccccgtttttgagcaccttcagcctgctttttgtattgatattcatgtgggcagctttgattgaatattgaaagaaacgcttctgatttcctttcaatccggacaggtcgggagtttgctccatatcaaatatcgttctcagcttttcccggttatacgtccgttttgacctgaacagcttgcctttttcataaagctggccggagaataggtaaaataagtacccggcgatcggaaaaaagataagaatgtggatccataacagcgtgtgctgcgaggtgcggttttctaagattaacgaataaatgctgaacaggataatgcttgcatagcaaagcaatccgccgtaaaactcaagcctggaaaccggaaaaaaccatatgacatatgctccgatcagcatcatatataaaaagcaaaattccagtctccttttcagcatcccgactctctccaatctgatccgatatctctttataccctctattctccggcctgtaaacatatgaaaaagcctccccgcccgagcggaaaggcttatgatgaggcttcctgtgatgaaggagaagagcgttttcagcaaccgttgaaaaaattattccccttttgcaaggaggtgtttagcgttttcgatatacaacatagctgcgagtcaagtacttgagcggcaggctgaacacgtgaaccaatctcgtaaacggccagaggataaaaacgatgtatccaatgatgatatgaaacttaaaccatagcgggacactctccatcaaagaggcatcaggcctgaacaaaatgagctccctgaaccacggccccactgttgtccggtaatcaaagcctttcgaatcaatgttgagaaacgtggccgcaacgcccgtcagcatcataaacagcagcagaatgagcgtgagaaaatccgccggcgagctggtgttgcggattcttttgtcaaacagccttctgtacgtcaggatgaacaggccgatacacgccgcgacccctgcaggcaggcccgcgccaatcgccattttgtgatacgtatgctcggaaatgtcaatggcggagtacacggcttccggaatcagaattcccatgatatggccgccgatgacgcacagcaggccccaatgaaaaagggtgctgcccgccgcaagttttttcttttccaacagctcgcttgatttagccgtccagccaaactggtcatgctgatagcggtaaatatgtccgccgataaagatcgtcaatacaatgtatggcatcacgccccagaggatctgcccgttcatgcctgaacagccccttctttgctttcatgtacgccgatatcttccagcgcggcaagcaggacatgcagcagcccggcgtatatgctgtcatttttttcgaggcgggacgccagctccctcacattggacagatatttctcaaatacgcttcttgcggcttcaatttccgcaatcgccgcaaattcaagcataagcggcagataatcaggcagttctttctctgtcgggaggaaaccggattgctggtatgtgttctttaaatgcagcaattcaatgccgcgttccctttgctcgcctgagttaaagtaggtgacatacatgttcgtttttttcccgaaatcgaacgtatagacatagtgttcaatcagcgcttcctgagaaaatccggctgccgccttcaaaaagcgcagcagcttctcccggatttcctggctgctgatgtcaaggagaagagtcttccaatcaggaagctcagctctccagtcttcgtccggataagagagaagacaggaaagagcggagaacgtaatttgccggtctatggtgttcatcttgttacacctcatttttcaaaaattagaaacaagacccggggccgcctgaaaatgataagccgcagctcccttgttcagcgtataaatctgacacttcttcccgatggctgctcggaatcacaaagcggtcgtcatatttggcgatcgccagcagccgatacatgtcttcaatttgccgttctgtcagaccgacactggagatgagtgccgggtcaatggatttattcgtctggactgctctcatatactggcgcatgacagacattttctttaacgttgaccgaatatggtccgtgtctcccgccgttaatagctgcgccaagtagtcaatcgggattctcatttggtcgatagccggaaaaatgtcttccgccgtttgccggctgccttttccttcaaagagattcataatcgggctgagcggcggtatgtaccaaaccatcggcagcgtgcggtactcaggatgaagcgggagcgcaatcttccagtcgatgatcattttatagatcggcgattttcgcgcggcctctatccattcatccgggatgccttgttcttttgccagtctggcaacctcaggatcattcggatcgagaaaaacgtccaattgggaatgatagagatccttttcattttcaacagatgccgcttcctccactttgtccgcgtcgtacagcatgacgccgaggtagcggattctgccaacacacgtctcagagcagatggtcggcagtcccgcctccaaacgcggaaagcagagtgtgcatttttccgctttgtttgttttccagttaaaatagacttttttataaggacaggatgagacgcaatatctccatgaacggcaggcgttttgatccacgagcacaatgccgtcttcctcgcgtttgtacatggcgccggacgggcaggatgagacgcacgccgggttgatgcagtgctcgcaaatacgcggcagatacatcataaagacttcatcgaattccgttttgatcgattcctccattttttgcacgtttggatcttcaagccccgtaatgtggccgcccgcgagatcatcctcccagttcgggccccattcgatattcatgaaatcccccgtcagtgacgatttcgggcgcgccaccggctggtgttttttctgcggactgtttgttaatgtttcataatcataattccaaggttcatagtaatcatcaatcgtcggctgattcggattatagaaaaggcctgccagccgattcgttttcgggccggatttcagcccgagctttcctttttttaaagtccagccgcctttatatttgtcctgatcctcccattgcttcgggtagccgatgcccggctttgtttctacattattgaagtacatatattccgcaccggagcggtttgtccacgtgtttttgcaggtgacgctgcatgtgtggcagccgatgcatttatccaagttcatgaccataccgatttgcgctttaatcttcaagccaatcgacctccttcagcttgcggatgacgacattcaggtcacgctggttccctgtcggaccgtaataattaaagccgtagctgagctgggcgtagcctccgatcatctgtgtcggcttgacgtgaatccttgtcgggctattatgggtgccgccccggttattcgtcagctttgtgccgggcacgttgatgtggcggtcctgagcatgatgcataaacgccatccctttaggaatccggtgggacaaaacagctctcgcgacgacaacaccgtttcggttgaaacattcaatccaatcattgtccttgatatccgtgtcctctgcgtcatctttattcatccacacggtcggccctccgcggaacagcgtcagcatcggcagggaatcgaaatacatgctgtggacggaccatttattatgcggcgtcaaatagttgaggacgatttctttcccctcctgatcaggccgcttgctcagaaacggacggtgctgaaggatcggtttaaatgtcgccatcgtttcaccgaattccatcatcagttcatgatcgacatagtaggattgtctgcccgtcagtgtccgccatgggattaatttttccacatttgtcgtaaacggcgagtatctgcgcccccctttttctgagccggtaaaggccggagaggtgatgaccgttttcggctgggctgtaatttgctcgaacgtaaagcattcttcctcccgctcttccgcaaggtctttcagcttcagatttgtgatgttttcaagtgactcccatgctttgacggcgacttttccatttgaagtggacgacagggttaaaatcgcttccgccgcctgctttgcttcacttatattcgggcatccctttgcaacactgtccgtttcggtttctcccagtctctttttgagtgattcatattcatcggctatcgaccagctcatgccttttgttccgctcggttttaaagcagcgtttggaccgagcgcggtcattttatgaaaaatatgcttgtaatcccgttcgacgacttggatattcggcatcgtttttcccggaatcgcttcacattcacctttgctccagtcattgattttgccgaacggctgggccaattcctgcatggtgtcatgaaggagcggcgtcgcgacaacctctttcaccggctccatctcgacttcttccgcaagatcggaaaccgcttttgagagggctttgaaaatatcccagtctgacctcgattcccacggtgccgagatggccggagcaaaagggtgaatgaacggatgcatatccgtactgctgagatcgtgtttttcataccatgtcgccgccggcagcacgatatcggaatacagcgccgtacccgccattcgaaaatcaagattgattaacaagtcaagctttccttccggcgcctgctcccgccatttgatttcttcaggacggatgctgtcgctgtcgtcattcatcaaaccgtttgtcgtccccagcagatgcttgagaaaatattcgtgcccttttcctgagctggagatcagattggcccgccatacgaagagattccttgggaagttcacttcattgtcaggatcttcaatcgcgaatttcagctttttctcttgaagctgtgaggccacgtacgcaccgacgtcttctggtgccgccgcccccgctttttcagcttctttgtacaaatcaatgccgttttgattgaatgtcggataagacggcagccatcctaatctggcagccagcacattgtaatcagcgtgatgcttgtagcgggatgacgcagcaatcggtgaagccaaatcgctgatcggctggtcctcataacgccactgatctgtcgcaaagtagaaaaatgaggtgccgttttgcagcttaggcacgccttcccagtcctttgcagttgcaatcgtctgccatccttcagcgggacggagcttttcctgtcccacataatgagcccagcctccgccgtttacgccttgcgcgcctacgagtaaaacaagatttaacaccgcacggtagatcgtgtcggagttgaaccagtggttgatccccgccccgacgataatcatggatctgccgtccgtatcgatcgcattttgggcaaactccctggcaatctgaatgacggcttctcttttaattcctgtgatccgttcctgccagccaggtgtaaacggacgaggatcatcataggatacagctgcttgtttgccgatgccccggttcacgccgtagttggccaatatcaagtcaaacacggtcgtgacgtacacctcttcgccattcaggtttacttttttaatcggaagatcccgctcaagcactttgtttccgtcatttgaaaaatacggaatgcgcaccgtgccaatttcgtcctctattccaagtacagagagacggggctcgatctgttccccggtgtcttcatcgatcatatgcaggttccatttcttctgaccgtcccagcgggagcccattgttccttgcggtatggcaaacgcgcctgtctgttcattccagaccgcgggcttccactgatcatgctttgtctgccgcccgatgtccttcgcatgcagaaaccgccccgctgtatacacgccatttttttttgacagggtaacgaggaatggaaaatccgtgtattgctttgcatacttgataaaatgctctgtctcttgattcacgtaaaattcctgcaaaatgacgtgacccgttgccatcgcaagcgccccgtcagtcccttggcggatactcagccagtcatcggcgaacttggaggattccgcaaaatccgggctgactgaaatgaccttggcgcctttatagcgggcttccgccaaaaaatgcgcatcaggcgttctcgtcaacggaacgtttgagccccatgtgatgatatagccggaattgtaccaatcactgctttccggaacgtccgtctggtcaccccaaatttgcggggacgccgggggaagatccgcataccagtcataaaaactgagcattgggccgcccattaaagacataaaccgggagcctgacgcatggctgatcatggacatcgccggaatcggggaaaaaccgacattccggtcaggcccgtatttcatcactgtatacagcagagaggccgagatcagcttcagcacctccggccattcagcgcgcacaaaaccgcctttccctcttgcctgtttataagacttcgctttttcagggtgttcgacgattgatttccaggcatccaatggattttgatgagcctgcaatgcttcccgccacaaattgatcagcacaccgcgcacgtatgggtatttcacacgcagcgggctgtagatgtaccacgaaaaactggccccccgcggacagcctctcggctcgaaatcaggcatatccggacctgtagatggataattcaagttttgtccttcccacgtgacaattccgtttttcacgtaaatattccagctgcaagaccccgtgcagttgacaccgtgggtggagcgaacgactttgtcgtactgccatctgtttctgtatacattctcccaatcacgatcttcttgggtggtttggctatgattatttgaatgatgttcgataggagaaaaatagtttaatctcctgaacaacggactcattttctttttcttcatgatcgttcactccttccgagtcaggtgatgctatgtacactataaacagagacatcatgttaccttgtgaactatgtcacacactctgcttttttcacaaaacgtccacatacagaagaaggaagggcgcctgaatcatttagccgccttagattcaaagaaaaacccggctctatttaagaaccgggctctgcgctttcatcctgtgatgtatggagataccgtaaaaacaattgataggaacaaaagacattttgctgaagcatcgccaaaaagttcatttgcagccgcggatggtaagacatcatttgcttgaacatagaatatggaatatggagtgccagaatgtccggggaagcattaactgagataaaaggcgatagagacagtccgcctttttcatcaaccggaaacacagcgcctttttcccacagcgcaacggtttgcgagccttcagggagcctgctgtccttaaaacggatactgccttttaatacgatatatacggattgtgaatgaagaaaggatggagactgatcagacgagccgcggataaacgtcccgtttttcaataaggctgcgacgatggacagaggcacttcattaaacataggaagttgtttcagacataataaatagtcacactgattcataggaaagcctcccgtgctaaggatagctttagtgtagcccgattgagcctgcacggcagtgatatagttcacagcttgtatgatgaatgtcacttatcaggaggatgcctgcatttataatgaagtaaaaaggaggattttgatgaaggcgatgattccgaagcagcacggcgcatgggcgatgctgctgattccatttttactcggcatggtcaagggaggcccggttttctggcatattccgctctttctaggctggcttttcctttatttgacggtttatcccgtttcacttgccttgaaaaagaaacagctcaaaccctatcaaaagtggatatggtactacggtgtaccggcctgctgctttctgaccgtttctgccgttcataagccccatctcatctgggtgggcgtttctttactgccgctgtttcttatccatatgcattatgcccgccgaaaaaacgaacgagcgctgacgaacgatgctgcgggtgtcctgttcttttgttcaggcgggcttgcgagctgctggctgggaacgggagcccttgacggctgggcttggtttctattcttgcaatctgctttattttttatcggaagttctttttatgtgaaatcagtcatccgtgagagaaaaaacagaacatttgcatactggtcatggggatatcatctgctccttcccttattatcggctcttctcggtgcaggctgggcgttttttgcttttatcccaagcagtttgcgggcatggtattttcacgggagagattggtccgcgaaaaaaatcggcattcttgaaatcgcaaacgccggcttctttttcgcggtcatgtgtacatatatggcgtaataaaaaacaaggacagcggctgtccttgttttttcagtcaatattacagatctccagcggacagttttcacactcgatctcacatcgtaaatagtcccgcttgtgcaaaataattttcccggcttcgtctatcgaaataaccccttgtttgcgaaggtctcccagcatgcggttgacgctttctctcgccgccgcgcaaaacttagccaaatcctgatttgtcagcacaatgttgatcagaatcccgtcgcttcgttccaccccgtagctgtttgataagcggataagagtagaatagagcgccccttttttgccgtgaagaagcagatccctgattttggactgaattttccggagatgggtgctcatccatttcataaattcaaaagtcaaatcaccattttggattaattccttttccagcttgtttttattaatgacgagcacctcgccaccctctaacacttttgcgctgagcatatatctcggctcttctgtaaacaatgtcagttccccgacaatatcgtttttttggcagattctaagcgtcaggtctttgccgtcagatgtcagcttgccgatttcaataagtcctgattggatcagataaagctcttctgcatccattccttcttgaaacaaatacgtgtgttttttcattttccttttcgtgctgatcgatttcagcaattcatggagttcgcgggaaagaagttctttatcagattttcggacagagagaatattcatgaactcacctcgaagaaagtcacgttgcgtatgtttattgtaacgtgacttgatttgcactcatccaggaaaaactaacaatcttgtgaatggatcattatgaatggaggctctgactgcttctctctgtatgtgttttcattttttcctgccaatacatccagatcacaaggacaaagctcgccaacgcaacctccgaaagcgccataaagccgatggcatattggcctgttgcctgaaatacacttgccagaatcagcggagggaaaaagccgcccagtccgcccatagcagacacaatcccgttggcaattcccgcctgctttgaaaaatagaaaggcaccagtttaaataccgttccgttcccaatacctgagcagaccgccaccgttaatgacccaaacgcataaaggccgatcgccggcgagaatgacagcataacgcctgatagcgtaagacccgcgaaaacgaacatcaaaatgcggagcgggttcattttatcagcaagaaatcctcccgcaggcctgagcagcgtagagaccgcaataaagccggccgtccgcagaccggcatccgccggggtcagcccaaaatgctcaaccaaaaagttcggaagatagatagtaaaggcgacaaaggcgccaaacgtaataaaataaaacaggctcaaaaaccaaagcacatgatttcggtaaacggctttcatttgagtttttacggaaactttgaccttcttttcatgccggtcgccgaataaaacgtgcagtaatgcgaatacagccagcaaaaccagatacatctgcacggttgctttccatcccgcagcttgagcaataaccggcgccgcaaatgtggtaatggcggtgccgatgtttccggcaccgtaaattccattgacggcaccgtgcttttctttcggataatatttcggaagggaggtcactccaatggagaataccgctccgccgatccctaagaaaaagccgcccgcgattaaatcaaacagagaatccgcgatactgatccaaaacacaggaaacaaaagcaggatgaagctgatcataaacatcagccgcgccccatacctgttcgtcaaataccctaatggaatgcggagaagcgatccgagaataacgggaatcgccgtcaccaatgaaatctcgcctttgcttaaatgaatatctgatgtcatttgggaaatgagtgatgaaatcagcacccacaccataaaccctgccactaagcttaatgactgcaatgataattgaatatgttgacgattgatcattcggcttgcccctttcactgattcaatatcagtcttatcatacaaaaactcggtgtacaggattgtgaattacatcacacgctttatatgcaaaaaaaagacaaagcccgaagactttgtcctttcatgatgattacattttttccggagccgatacgccgatcagctgaagcgcgttgttcagcgtaatttgcgtcgctttcattaaagccagacgcgcgcggctcttctctttattttcaggatcgatgactttttccgcattgtagaagctgtgaagagcggatgccaaatcataaatgtagttggtgatccggtgcgggatgcgtttttccgccgcctccgccacagcttcagggaatccgccgatcgttttcagcagatcgtattctttttctgattgaatatggctgaaatcaagatctgccgccggtttaagtccctgctcttccccttggcgtagcatgctgcaaatacgggcatgcgcgtattgcgcgtaatacacagggttttcgtttgatgtagatacggcaagatccaggtcaaaatccatatgcgtatcggcgctgcgcatcgcgaagaaataacggaccgcgtcaaggccgacctcttcaatcaggtcacgcatcgttacggctttccccgtacgtttgctcatcttcattttttcgccgtttttatataaatgaacgagctgaatgatttcaacttccaatgtgccttttttgtaaccgagcgcttcaattgccgctttcatacgtggaatatagccgtggtgatccgcgccccacacattgatgagcttgtcgaagccgcggtcaagcttgtctttatggtatgcgatgtccggaagcagataagtgtatgagccgtcttttttgatcagcacacggtctttgtcgtcaccgaacgttgtggaacggaaccatgtcgcgccgtcctcttcgtatacatggcccttttcgcgaagcgcctcaagcgcctgatcgatttttccgttttcgtacagtgatgtttcagaataccatacgtcaaacggcacgcggaaattctccaggtcggagcggagtttatcaagctcgtactttaagccgtattcacggaaaaacgcctgacgttcgctctcctcttcatgtacgaagcggtcaccgaaatcttcggcaagctttttcccgatagcgataatatcttcgccccggtagccgtcttccggcatcggtttttcaagaccgagcgcctcaaaataacggacttcaacggagagcgccagattgttaatctgattgcccgcatcattaatatagtattcgcggctcacatcatagcccgctttagaaagcacgctgcacagcacgtcacctactgccgcgccgcgcgcatggcctaagtgaagatctcccgtcgggttggcggacacgaattccacctgaatcttttcgccttgtccgacgtttgtctctccgtaatgttcaccggcttcaagcacggacggaatcagttttgttaagtagccgttgttcatgtaaaagttgatgaagcccggccccgcaatatccatcttttcaatggaagccttgcctttatcaaatgccgccacgatctcctcggcaatttggcgcggcgcttttttggcgattctcgccagctgcatcgccatgtttgtggaataatcaccgtgtgttttgtctttcggcgtttctaacagtacgcttggaatctggctttcttccgccaggcccgctttcagaacggccgctttgatttcttccttcagcacgtccttcatttgttccgcaatattcatgcgtgagttcctccctcatacgtgatcgtcatattatgtaaatgctgctgctcgtctccgacatgcatgtcatatgcgatgctgattcggcctttttcttcaccgagatcagattgaatcgattttgtgcttgtttccagctcaagctcaccaaatgacattttatatttcgtaattgtggaagctcccgttatgaaacgctgattcattttaacagcgcctgacctcatgatcaggacttcgccttcgctcaccttcacaatcgtttttactttgcctaggtcgtgttcttcataataagatagatacactttttgttgttttacatagtaaaatccggtagtacggaattcgatgacttcctcatttccgtcatcctcgatcacagacttcacatggagtgttatcggtgtctcttgcttcattttgacacgtccttttcatcattccactttgacttgaatagtataatcattcagcttgtaaacttcaactgcttctatcttaccatcattgctcattagatttgaagataaacctcataaaaagcagttccttatgagaagagaaaatcatatcactatgtcacccaatccgtgaaaaacatgacagcagcttttcagaaactcacacagtctcatcgaagctgctgcgacttccagcaacatagattgtgcaggagctataaaaacgtccgccaaacacacgtgatggcttctgtattatgccaagtcatcatattcggctgcgtgttcgaaatcgtcaaggccgtcccttgccgtatcaacgggactcgcggtgttactgattttgtatttattgtattttatgcggacgaacttgctgcagcttttccagcatgacagcctgttcaaaaaagggcttgcgggagcgctgacaggagccggggtttggtggatgctcagtttcaccataagtgaactgctgtttttgatcatcctggctgccatccagcagatcggctcatttatttataaacgattgtcttatcccagctctgcttctctcgatctatgaaatcgctacattgcaatcgcagacggacccgcgccaaccgggatcaccgtcacagctgtataatcgctcgtgcggtacacggtcacggtattgtcgtcgggctgtgctgcataaatgtactgattatcaggtgttacggcgagatcagagacgccggggagagaggcagttgttataaaagtatgctgcgctgtatctacgacagtgagattctctggggatgcctcaaaatagggctcaaggaaaaacgcacgagtcccatcagcagaaaaaacaattgtaattaaaccgtcaaacagtctgttaattcgtgaagattcgctaaatattgtcaaatctatcacagaaacggcattcggccctagctcaccattttccagataagcaaaattccctattatcggggttacaattaaatttggtgtttcaaagttacttaaactttcgatcagctgtccggtgtttaagtcatatttattaacgacccaaattacagagttggtcgtatagaaaaactgtccgttagggtctagggcaaaatcgtccgcagcgggtgacaccgtgaacgtattggtaatggtttgcgaggaaatattaatttcataaacggagctgcctcctgcgagaatataagcaaattctcccccagtttcaaactggatttttcttggggctcctacaagagggatggtttgtgtaaccgttaatgtttcgttgttaatgatcgacacaagattcgcattcctatggagaacatacgtatacgctttatccaaggtaacacccaaatcagtcgggatatcagataaagaaatggtacttacaagagtattcacgtcagcatcaatgacagaaaccgtgctgtctccagtgtttgcagtaaacacgtaagatcgatgatccggttccggcacaagcacaatcgtgcctgtcaccgataaaggactgccatagaatggcggaacgacaacaaggttctcgatcgtaatgtcactgacatccgggcaatcatcgggttcatcagaataatagacgacttggtcaatctctgcattgcggatgacagaaacagacccgtccccttgtccatattgatttcgcactggtgagacactgacgagaagcgtaacagttccctgcaggcgcactgcgaattgaacaccgatttcatcaggctcaggccccgtctcaatgaaacagcgttcaatgacacaagaaaggctgtctgcattccacgtcacgtttgcaacagcttcagccggatcaacaacaaacccctcaggcaattcaatcggcgcttgaaacatcgcttcacggcttgcttcttcctcgcaaaaacataaacaatcttcttgtgcggctcctgctttttctttaaaggaaagcatgttatttctcatatcttcacttccttttcagacatacactgctcacgcagatacaacagaatatggaagatgtatttgtttgcttgtacaaattgtcggggataatagcggatttttgaagtgatatccgcagacatgcggttttaaaaagaaaacattgcggtttttttgcgctatccttccgaatgaaaatgataaaatatgtcatatacataacgtggaagggagggattcggaatagtggcgagtgttgtatcgtcttcagcggttggagaaaaaatcaacgaatggtatatgtacattcgaaggttcagcatcccggacgccgagtacttgcggagagaaatcaaagaagagcttgcaagcctggaagatgaccaggatcttcatctgtactattctctcatggaattccgccacaatctgatgctggaatacctcgaaccgctggaatcgcagcggatagaagaacagccgagactatcggatctgctcgcggatattgataaaaagcaggcccggctgaccggacgccttgattattattttaattttttccgggggatgtatgagctggaatgccgtgaatatctttcagcgattcagttttttaagaaagctgaaagcaaattgacgtacgttacagatcagatagaaaaagcggaattttactttaagatgtcagagtcctactattatatgaagcagacttatttttctatggattatgcccggcaggcttataaaatttatcataagcaggaggcatataatataagggtgcttcagtgccattcattgttcgctaccaactttcttgacttaaagcaatatgatgaagcaattcagcattttaaaaaagcttatgccatggcagaggcagaacagcagcctcaattaatgggccggactctatataatatcgggctttgttttaacagccaagaaaattacaaaccagccattgactacatcaaacgggcaatagctgtttttgaagatgggaacatcatcacttctcttccgcaagcctatttcttaatcacacaaatacattataaaatcggaaatatggccatagccaggcaatatcatgacaaaggagtatcttacgcgaaggaggcggaagattcattatatatagcggagtatgaatttttagaatctttgtacgtcggtgagcctgatgaagaagcaattatggaatgttttgacttcctcaaggataaattgatgtatgctgatcttgaagattttgccttagatgtggcaaaatattaccacgagagagaaaatttcgagaaggcttccgcatattttttaaaagtggaagaaacaagacagcaaattcaaggaggtgtgaagttgtatgaaattgaagtataaattagtacttacttgcttagctgtaggcactgtttttgtttcagccgacatcgcaagtgcaccggaacatcaatttgaagttgctcagcgcggaatgatttaaaaattaaacttgatagcagccaacatcttacggctgtttttttatctgttcttccttattaaaaacccggaacaaaggctgcttctgccctgttattccgggttttcttctttctacttcacaaacccaagcagcatttcacgaatcatcttgcttgccgtgtttgcggtttgttcggagtggtcatagatcggcgcgacttctacaaggtcagctccttttacgctgacttctgagcgggcgatttcatggatggacgcgagcaattccttagacgtgatgcctcctgcgtcaaccgtgcccgttcccggcgcatgagcggggtcaagaacgtcgatatcgatggtgacataaacaggacgtcccgcgagctgcggcagcacttttttcagcggctcaagcacttcaaacttagaaatgtgcatgccgttttctttcgcccattcaaattcttccttcattccggaacggatgccgaatgaaaatacgttttgcggcccgataagctcggccgctttgcggatcggtgtagagtgggaaagcggctcgccttcataatccgtgcgcaggtctgtgtgcgcgtcaaaatgaatgatggcaaggtccggaaacttcttatacatggctttaatgacaggccatgacacaaggtgctcccctcccatgccgagcgggaactttcctttttctaaaatgctgtccacgtattcctcaatcatatcaaggcttctttgcggattgccgaacggaagcggaatgtcgccggcgtcaaagaaattcaaatcagccaagtcactgtcgagatacgggctgtattcttcaagaccgatagacacctcgcggattctccccgggccgaaccgtgaacccgggcggtagctgaccgtccaatccatcggcatgccgtagaggatggcgtccgcctctttccaatcggggcggcttgcgataaatacttttcctgaatatgcttcatcaaacctcatgataaaaccctcgctttcctgtaaaaaagcgcaagattcgctcctgcgccgtacgtttttatttaattaagtcgctcacaaatttcggaagaacaaatgccgctttgtgaagctctttcgtgtaatacttcgtatcgatatcaaagaaacggctgtcttccacttcaagcggatcatactttttagaaccgatcgtaaatgtccacagaccgcttgggtacgtcgggatattagccgtatacagacgggtgatcgggaagatttctttcacatcgcgctgtacgtttgtaatcagctccggtgtaaaccacggattgtccgtctgcgcgacgaagatgccgtcttcttttaacgccttggaaattccggcatagaaaccttttgagaacagattgacggccggtccgaccggttctgttgaatcaaccataatgacgtcgtattcattttctgatttcgcgatgtgcatgaagccgtcatcgactctcacgtctacgcgcggatcatccagcttgcccgcaatagatggaaggaattttttagagtattcaatgaccttgccgtcaatgtcgacaagcgtcgctttttttacgcccgggtgcttcagaatctctctgatgacgccgccgtctccgccgccgacaacgaggacgttttccggattcgggtgtgtaaataacggtacgtgcgcaaccatttcatgatagacgaactcgtccttttcagaagtcatgaccattccgtctaagaacagcatgttgccgaattcttctgtctccaccatttccagatgctgaaattcagtctgttccgtatgtaatgtttgtttcacctttaatgtaatgccgaagttcttcgtctgcttctccgtataccaaagctcgctcaattgtcatctccctttcaaggcttatttcatttattgtaagcgtctgtttcgcttttattccggttaaaatctcattttcacctaaggaaaaagtatagaggatgggagggaaaaagtaaagatgtgtccggcttgcgatgtttaaaaaacccccttttttcacataataatagaatcatgaaaaagggggttcccaaaagtggataaagtatctggaaaacagctcagaatcacgttcaaaatcatccgcgcctgcatctttctgacattgatgggcggaatgctggccggcgtctgcttcacatccattcttcttgcagcgaaatggcagggagccccctccgtccgggttcctcagtctacgattctttatgcaaatgacggctcaaagctgggtgagaccgatttcggggaaaaacgctactgggtccggttgaaagatatcaatccgatagcggtgcaggccgccattgcggtagaggatcaaaacttttacagccaccatggttttgattaccggcggatggccgccgccgcgcttgctgacataaaggcaatggccaaggttcagggcgccagcaccattacccagcaatacgcgagaaatctctaccttgagcatgataagacatggaaacgaaaatggaatgaagcattttacacgatccgccttgaacagaactattctaaaaacgagattttagaaggttatgtaaatacgatatattacggccacggcgcatacggaattgaagccgcctcccgcctgtatttcggcaaacacgccaaagatctgaacgatgcggaagccgtgcttttggcgggcattccgaaaggcccgtccggctattcgccttatatcagcgaaaagaaagccaaacagcgccagaaaaccattcttcgactgatgaccgaacagaaaatgatatcaaaagcaaaagcggaaaaccttaagaaagccccgcttgcctacaagccgctgaaaaacagaaccgcggcgaaaacggcgccttatttttacgatgatgcgatgaaagaacttgagaaaaagctcggcatgacgcgcgaacagctggcaacgagcgggcttcgtgtttatacgacgcttgataagcgcatgcagcggatcgcagaaaacactgtggcacatacgatccgtaccggctctgacattcaggtcggcttttccgcaattgatccggcaacagggcgcgtgcttgcgctgctcggcggacgtgactacgaaaaaagcccgtttgaccgggcgacacaggcgaaacggcagccggcttccacgatcaagccgcttttgtactacaaagcaattcaaagcggctttacaccggtcacgctgatgaaaagcgaagaaacagagttccagattgacgacaacggagacacctattctccaagcaattacaacggctactacgccaataaaccgattaccctgcttcaggcgcttgcgttatcagacaacatttatgccgtgaagacccatctctttctcggcatgaataagctcgtgtcagcggcgaaggaattcggcatcagcgagcatttaaagccccttccgtctctggcgctcggaactgaacccgtgcgcccgattgaaatggtcaatgcctacgcgatgctcgcaaacgggggaaaacaaatcaccccttcatttatcacaaaagtgacggataccgccggcaacgtcttgtatgaacagccgcgcaggcatcaacaggttcttgataaaaaagcagcttttgtaacggcaagcatgatgactggcatgtttgataaggatttaaacggctatacttccgtcacaggacgcaccatttcagacaggctgacccgaacctacggcgggaaatcgggcacgacgagcgcggacagctggatgatcggttttaatcccgctcttgctgccggcgtatggacaggctatgacaaaagcagcacgattgattcagttgaggaaaaaagctatgcgaagaccatttgggcggattttatggagaaagcgctcaaaggagaaccggaaatggcgtttaaaccgccgaagggcgtcacgggcgtctacattgatcccgcttccggctacacatcaggaccaggatgcgccgcaaagcattatacgtattttatcgcaggcacagagcccgcggatgtgtgcttcggtccggaaccgtctaaaaaagagaaggaacacgcccccgcccgtaaagaacctcggcaaaaaaaatggtgggataagtggctcggcaaaaaagactaagcccggtgcatcgcgcaccgggctttaatccgcatcttcctcaagcacccatgggagcaaaagtgaaaagtcgagatgaataataggatcaggaaaatccttcggtataaaaaaccttgtactcggcaaagaaaacgaaaagcggatatctcccgccttctcaatatgagacttcggccagccttcgccaaggcggccgacaatcggataactgcccgcataatgatgcaggccgttttcctttccgatctcccccacgtcgtgacagacagacggacgaatcccaaactgtgtaaacaatcttgttttctcggcgggaaggagattcatcgcctcggagaaattccggcagttcgcgcaatcgcatcgatcgtcccatggtttttcgtgttgttttctcgtttccgccgcatccgcctcaatgacccaaggaccgatgtcaaatacggtgaacatgatgaaacctccgcttaaacatgaaaaaccccgagtcttggttcggctcgggactttccatgtcctgattctgtaacaacagtttactcagtacaattgcgaaatagtgcaaatatttataaagttcacaaaaagttcacaaattatttttcttccggaagcagacccgttttcaattcatcggatgaacggtcccagagcccttggtcatgcttctgcaaaaattcagcgagcacccgctttgagctgtcatccattttgtccacgataatgcggcgcttcattgatttatccattaaattcacatgctccggcaatgacttatagcctctgcggatacttctgtccacggtcatttcacaagccgtcacacccgcgtaataagggccttcttcttttctgtcgatggtgacccatacgagccagtacggttttccgttcggcacttcatccttgttcggcaggaatttgatgcctttttccacgacactgcgggcgtgcatggcgccgatatcgacgaaggcttccttctcttccacatcgacaaataccggagaaatattgtcaaggctcagcgatccggcgccgaaaccgccatgtccgtcggtcggatcacttttaatgatattaaacccgattgatttcttcttttttccttcttccatgaaaataccctcctacaaaagcggttgaaatataatggcaaatactctgagaatccagtctctcccctcgcttaacagcggccacacgacataggagccgaccggtgtcacaaacagcacgaggaacacgataatcccgtagctctcaaattgagtcattttggcgcgcacccgcggcggcacgagatcctcaataatccggtagccgtcaagcggaggaagcggcagcaggttgaataaacacagcgcgagattcagctgtatccaaatagagaaaaagcggtcaagccccatgctgaatgccgaaagcagctccattccgtaagcatgcatcaacactagcaaaaagaaaccgataaaggcaagaagcaggttgcttacaggcccggcgacggaaaccagcactcccgccagccgcggtcttttaaaggcgcggcggttcaccggcaccggccgtgcccagccgaagcccgcgaccaaaataagaatggttccgaaaacatcaagatgtttaatcggattgagcgttaatcttccctgtctcgccgccgtatcatcaccgaaccgatacgcgacatatgcgtgcgccagttcgtgcatcgtaaatgccacgatcagcgtaatcacgacatagggcataagctccagcggataatataaaaatctgtccaagtgtaaaaatcccctttttttaaaaatgcaagattgtcctccgttcagtatactataagtgacctctcttccaaagagaggaaacgaaaaggaggaacagcaccatgccgctcgtaaccgttaaaatgcttgaaggccgcacagatgaacaaaaacggaatctggttgaaaaagtaacagaagccgtaaaagaaacgacaggcgcagccgaagaaaaaatcattgtcatgattgaagaaatgagaaaggatcattacgccgtcgccggcaaacggatcagcgacacggagtaatccttgataaaggccggcgctgctgtacgcaagccggcttatttcactaccttttcaaccaggctgaaaaaggttttcttttcttcctctgtcaatgcttcgaacagctcgtcaatcagcagctgccggttttcaatcatttgcatggctgccattttccctgattcggaaagcgtcatccacactgtgcggcggtcttcgttatttctcgacctttccacgaacccttctttttctaaatgattgagagcggtggtcgtggcggaaggcgataatgtgacttcctgcaatatatctttaatcgtgcacgtgccgtgccggtaaataatcctgagaataaatcctctgatattgtttatactcttcggaattgtcgcctcatcaagttttttcgtgctctttaagtattttgtgagagcgtaatccagtacatttgcttgcaagttatcgtgcttcatgcagaaactccccatttcaagatgcatccatcatcatttaattgtttttattacattttactgataccttacggagaaagtcaaaattccggtcggaacacccgcaacttttatcctgccctgtacagacttttgtctccctcttttttcaccagtcccttttatgcaatgctggttttatagacatgattcaggtaaaatcattaagggtgactgcgtttgacggaaagactgatctgatgcgacagacaatatgatgggaaagaaacggaacaaacggggaaacagaacacaggattgttgattacacagaagatgtgacacgggtaaaagccaaagagttcctctcggcttttgctttcggatggagggatgcgtgttgcggaatatcctacaaaaaaaagacatcacccagctgcttgaacaaagcagaaacaggcagactgccaaaacgatgggtggatttgatttaacattactgggcatcggcgccgtcatcgggacgggcgtcatggtccttacaggcattacggccgcgaaaaatgccgggccttccgttatcttttcttttatcattgcagccgttgtctgcagtcttgcagcattatgttacgccgaaatcgcttctgttctcccggtttacggaagcgcttatatttactcttacaccaccatgggggaaattatcggccatttaatgggctggacgctcttatccgtttatatggtgacggcgtctgcggtggcaagcggctggtcaagttatttcaataatctgttagccgaaatcggcatgcctttgccggacagtctgctgcacgtgccgagccaggggggcatcgtcaaccttcctgccatcatcattactctactaattgcggtcgttctgtcgcgcggatccaaagagagcaaaacatttaataatataatggttctcgtaaaaatcggaattgttttgctgtttatcatcacaggcagcttttttgtgaagccgggcaattggcatccttttatgccttttggaatcaaaggcgtgatcacgggggcttctgccgtcttttttgcgtttctcgggtttgacgcgatttccgcttcggctgaagaagtcaaaaaaccgcagcgcaacctgccgatcggtattatcggttcactggtgatctgtacattagtatacgtcattgtctgtctcgtcatgaccgggatggttccgtattcacagcttaatgtgccggaagccatgtcttatgtattacagactgtcggacaaaacgcggtggcaggcgttatcgctgccggagcggtgatcgggctgatggccgtcgttctcgcccatacatatgcggcgacccgcatatccctggcaatggcaagagacgggatgctgccgaaagttttcacgattgtcggaaagaaatcgggagctccgatctttaatacgtgggtgatcggcctgacaagcgcatttattgcgggttttgttaacctgaaagagctgtcagatctctcaaacatcggcgcattattgacattcgccatggtcagtctgtccgtactgatccttcgccgcacccataaggatctgcctcggggattcaaagtgccgtttgtacccgttctgccgattttggccattatctgctgtttgtttttaatggtcaatctgccgctgaaaacatggctttattttatcgtctggctgatcatcggcgtaatcgtttactttttatattcgtacaagcacagcaaattgagaaaataaataaaaccaggcccgcttttttgcggcctggtttttgcataaaaaaagacgaaagccatcgcctttaacaaatgtgtttcagctcttctatgtagtgaagcgcctcttcatattcttcatcagtatatttctgtttgctttttatcgtaaacactttctctttcttttcctctgcttcaaggccgtcaaaatacaaaatcgtggacaccagctccagaaaccgggatgagcggctgttgacgctgtcgatgtaattcttcatatccggcatcgtaagctccgcatgatgtaaaaactcggctcccgtctccgtcagcgagtaccggtattgaaagtagccgccctttttttccttcacctcatccagaaacccaagattgcacagctcttcaattcgaagcgtcagttcttcggaatacgggccgtaaaaatgaaaatcatatttttcgtagaaaggatactgcattttcttcgcgatataaatgattttctgcagctttttccgcccgatgatttctccagaatccgagaacaccttcatcagttttgcatgttctttcaacaaattcccgacatctccttttccttctttaccaaaatccttctatgtcagtcccagcagctgccggatttttaattttgcttcagggttttctgaatcgtcaaaaatgaggtccatcggatagtacagcttatgatccgtccgccgtttgcccgaaatggattcgacaatggcggactgcctggacagctcttttatctggccgttctgcgttaacagatgaatcggcagacgctcttcttcctcacccggacggtaaaaatcatacggcagatccgatgaagaatcgaccaccaaatagtaattgggatcaattcccgcctctttaaacagagcggtcagctcaaaataagccgacatttcttcattcgggttaaattcggcatattgaaacagctggcggttaatgaaccggcggcacaagtcggacagaatcggatcctcttcttcctcccaagcctggaaataatacaaaataattgcttcatcaagcttcagataatcctcaagcgtcagcttcccttcaaaaatggaataaaaatgaacgggagcatgagtgaagatatacccttcttcatggagctgcttcgcacggtggagaattttcgtcaaaatgacttcagcgcttctcgtcacagggtggaaatacacctgccagtacatttgatagcggctcataatatagtcttcgacggcatgcatgccgctttgcttaatgacgatctggtcctcacggggacgcatcacccttaaaatccgttccatatcaaaatgtccgtagctgacgcccgtatagtacgcgtcccgctgaaggtaatccatccggtcggcgtcaatctggctcgaaatcaggctgaccacctgtttgtttctgtatgttttggcaatgacttcagcaacatcctgcgcaaatcccggacccgcctttctgagaacctgattcacctcagtatcgccgagaatgatttccctcgtaaaatcttcatgatccagatgaaaaaccttttcaaaggaatgcgaaaacggcccatgccccaaatcgtgcaaaagcgctgcgctgagacagagttcgcgttcattgtcatcccattcaggacgccctttaaagacatcgtcaaccattcttctgacaatctcatagacgccgagagaatggttaaaacggctgtgttccgcgccgtgaaacgtcaaatacgtcgtaccgagctgcttgatccggcgcagccgctgaaattcacgggtgccgatcaaatcccagatcagcttgtcccgcacatgaacatagcggtgaacaggatctttaaacactttttcttctgataattttccatttggatacgccatcgtcattccctcttttttttagccgtgattctattatatcggctcaatcatttgaaaacatccttgaatttgtccggcgttttgttccagttttccgaaactgatttttttgaagcaaaaaagcctgacccatcgggcgaggctgtcgtaaacacacaaattcactttttgatcttctttttcactttctcaatcagctcgtcctcagtcggcgcagacagcgggcggttgtttacgaaagcaaacgattttttgcgtccgggcccgcaatatgactgacagccgacctccacttttgcatccggatcagcttcttttaaacgcggcagcaatgttttaatattggtggcttggcaatcatcacacactcggaattcattagccatgatgtacgcttcccttcattcaatgttcctctatgttaattcttaatttttaaaaacgaaaaaaatcacatcacattccattgtacaaggattcatcttatcctgcaaggctctgcgtatctctcattctttcagccaatttgtataaatattttccaatctggacattctaataccatcaagattattgggggttgagaacattgacaaagcaaagacaggacgcctggtcagaggaaaatgatctgctgcttgcggaaaccgtgctccggcacgttcgggaaggaagcacgcagcttaacgcctttgaagaggtaggcgataaattaaacagaacatcggcagcatgcggattcagatggaatgccgtcgtccgccatcaatacgaaaaagcgcttcagctcgccaaaaaacagcggaaacagcggatgcgcgcgcttggcaacggccagccggccaagaagaaattattatatcagccgcctgcaccggattcggatatcattcaagaaaccgcagccgaaaagacggttcaaacagaagcgccaaaagatgagccgcaagccgtcatgtccggcgaacatatgccttatgtcgatgaaagcttcaaggaagagttagctagtttatcacatttgctggcgccacagcagccgagcccaacaactgagcttacaatggcagacgtcattcaatttctgcagagctatgaaggcagcggaaagcaaacctctgccctgcaaatggaaaatgaccgtttaaaacgggaaaaccaagaactgcagtctaaaaccgagaagctggaagcggctgtcgaaaaacttgaaaaagatcaaaaaaccattcaggaagactacgaaaccttggttaaaattatgaacagagccagaaaactagttttatttgaagaagacgaacacgcctccccgtcctttaaaatggatcggaacggcaacttagaaaaaatggccgaataacggcaaaaccccctttccttatcacggaaaaaggggtttttgtcatttgtcaatgacgcgcatgctgatctatattaatgtaaatattgtccgaggggccttcttccacaaggcctgcgcatctcagtccccgtccgtacataagcataaagattcaattcctcatcctaaatggttcttgggaattattgatcaattaactactgtgcaatacactgtataaataatacaattattagatatgatgggaatgatagtaaagtgaatagccaattacgaaaaggagctttggaactttgtgtgttatctctgcttctttatgaagatttatatggttatgaattaatcaaggtcataagtgaaacgttccctgtgtcggagggcaccatctaccccatattacggagactcacaaaaaataattatttaaaaacatatacagcagcctcagatcaaggcccgtcacgcaaatattacaaagtaacagaagaaggcgccttttactatcacacattaaaagcagaatggctcgatctgtccgaaaaagtgaacaacatcattaaggagggaaactgaatgtttaaagaccaatacctaaaacagctccggcgggaaataaaagatctgccggaacttgaacaaaaagagatactcgcggatatcggcgaaatattccaaatgggcggtgctgaaggaaaaagcgacgaacaaatcgccaacaatttaggagatcccaaaacacttgcgcgcaccttaaaagctgatattttcatcaatgatgcccaggagcagaaaacatggcgctcctttttcaaagcattcggcctgctgttaggcatgagcctgtttaacttcatggttgtgctgacaccgtttctttttgcctctgttacggtgttaagtttgatggcgatcgggctaatgctgataaccgggtcattctttcttcttgtgaaagtaccgattgttacagccatttttaacggatgtattgtccttggagcgggtatggcggtgtttatggccggatttgatctttcgaagctgatattccgtgtctttttacgctatttcaaatggaatgtcagcgttgtaaggagggaaaccattgaatcgaaaaatgtggtatagcattgctctcattttaatcgctgccggtctgatcggaagcatgttcttcggttttgacggcttttatcctaattcataaggaaagtgtgcaaatatcatgactgaaccagccctgatattgaaaaatgtctctaaaaccatcaatcatactcctattgtacagtcaatttctttcgatgtgagaaaaggtgagatattcggccttttaggaccgaacggctcaggaaaaaccactattttcagaatgatcgtacagcttattaaaaaaacagaaggagccatttcattcaagggcagaccggacagcgactttgaatatttcatgaaacatatcggggttatcatcgaagggccggacatgtatccgaatatgaccgctttgcaaaacctgaaatatttcactaaacttcgcagcgcctcgctccgaacggatgaccttatgaatattctcataaaagtcggattagagcaggctgcccgcaaaaaagtaaaacatttctcattaggcatgaaacagcgtttggggctcgcttattctcttctccacaaccctgagttattaattctggatgaaccgatgaatgggctagatcctaaagggatgaaagaattgcgcaccattctttctgatttagcgtagcagggagtttctattttaatatcaatccatttattgtcggaaatggaggagatttgcgacagggttgcctatatcaaaaagggacggattttaggaattgaagagatgaaaaaaagaaatgaccctgctcagaaaaagctgtttaccgtcatggttaataatcctgaaagggcgagagaaatattagaacaggaaggtattcttcaagtacagcaaaaagacagccgcatcattgaatttgaagcagaagaagacatcatcccgtatgtcattaaatctttagcagagaaagggattctgatttcccgcgtctccgcaagaactttatccctggaagaaaaatacatgataataacagataaggaggacgcggtatgagcatatttcatctggcgcagaacgaattcataaaaataactcgaaaaaaaggcacacttttatctctttttttcctgtttctcatcgttttgctgaccggccttatcgtgaatcatgaggtagatgcttcttcggataacaattggaaagaacggcttctcgccgaaaaaaaacaagaagaaatcgagaaaccgactgaaacgacgggcgtttattattcagctgatgttaaaaataaagactattatttggagcataacattaacccctatgaatggaacggctggaggtttttcagtacggttacttcaaacgggcttgaaattttcgtaagcttaaccgcaattttaaccgtcagcgggattgtttccaaagagtttgctcttgggacgattaagtttatcgctacaagtccgaaccgaagatggcggattttaacatcaaaatttctggcatccctcctgtttaccggcatggtttacttattttactgtataagctgtttgctgatcggcggcgtgttattcagtttttctaatgcctcatatccgctcgtctattctcatttaaatgacagcctgtataccatcagttcattaaaagcatccgggatcattcttcttttacgtttcatatcaattataagcattgtcaccatcgcattcactttgtcagtattattcaaaagtcaggctctctccctttgcttatccattttactgctgtttgccggcagtatattgggcggaactgatttgcttgctcaatttacgtggtataaatttacgctctttccgcatttaaatctcgttgcttatgtaaataaaagcgtcggtgatgcgatttcaacattaaacatcccctattctatgacagttatagcaatctactttcttatttgtttgctgatttcatttaccgtctttcaaaagagagacattacagcatagacagagtggcggcggcataatgagcggacggcaaaaaatactgacggtccagcattttgccgctgaccttcccttggtccatagccaatggatttaaataaccgaagcccccgttgcttcgctgctgaaagcatagaaattcccgcccttcccgtataaaaagcgcctcatcgaactggagaaatttcataatggctgtgtattttgcaacggcgtcgatgtgataccttctgcactcagctaacattaagcctgagaaagcaaagtctgatgttttgtaccattctatgagaaaaggctgcaattctttcatctgcaagtaagtgacaacataaagggcatccgctaattcttcctgcctgccgctcgatgccataagcaaatcagcctccctttccaagccgttttctaagaaaacgatcagctcttccggggtcaccgctttaaaataagctgctaacaccattaggatcatagaagaaggatctgatttcaactcatcttttaaaccgctgaccatttgttcacgaccgttatgaaaaaaaaggcttttggcggcatacatcttgcggtatacatgatacgcgtacgcgaacaggaccgggtggcattcgtgcgttttttctccaaaataacggtctaagtagaggatgacttcttccgtatccttgtttttttcgaaatgatgacatgccgctaaaccgcaaaacaggtgcatgagctcctctgcttccatttcttccgggtgcagctgaaggttcttccaaaaaaccagcagccattcttctgttttttttatattaaaatgttcctctactatctgcatgtttcaccctccagattcagaatctcaatcgccggcagaagagccggggcacaatgaatggatggattttcgttatttatataatgaagagctgcttgacagccataaaaaaaaggatcgatacatgattgaataaataacatagtgcacagctgtttcatatttctgctgccgagacaaaacacaagccatttttgaatggaagccttcaagccgggatgaagctgatgctctccctcatctaaataaagaagacaatactcaataaactccagctcgttttcagctgtccttttccatgcgtcatgaagcaaaggctgaaacatcgaatctttgtaaaaacgcactttctcatcatcagaagacattcccaactcgttcagcaaaccgactaattcagcgtatttaaaatatggccattctttttttatagaatagccgttttgcaacccatgacgtataatctgatcatccgcttttaatccctgcttctttttataggctcttgcagttaaataaatcaattcattcacaatggctgtgttactgtgaaacagatcttcccagcatgacttatcaacgaaagcagacgcaatccgttcaatatgttcttttacagcggaagaatggctcgtctttctgtagtatttgcagaagcctgcaaacagctgaatgcacttcatatccggaagcgattgttcggcaaaagataataaaaattgatccgtctcttcagctaatctgttcaagttaatagttcctttctgctctaagacaggcatgcgcagctcccgcagcaacaagtgttgtatggtagcaatgtttaaacacatcttctcttcgctgttcatctttcaaaccgggttgatgttgataggtgatgcctggaacattcccctctttcattcggccctggtatattttattccatgctgcctcatagagcggtttatgattttctctttccatgtcaatatttaaaaaagaactgcacatcaataattcactggtaatatctaaattctcgagacatatataaatcccgagaaacttcaggaccttttctttcaaagacggcagattatactccttatctgtaagcgaagaacatcccatgtctgttatataaaaaatcgtatgagttatactgtacgcatcatgatcagtcatatatgtatttgggatattctgaccagctgctgtgtagttatataagtcagaaaaatccgttatttctgaagtcacgcccgctctttccagactgtacttcagatccattttccgaaagggaattttagcaaggctgccatcaaaacgcgatgccgtgaattttttcagctcccatatcaccgaagcccgggacgggtgatcagttaaggtaagaaattcccccgcaatagccaatccagcaagaccgtccggatcaaaatgaataaattcttcaagcttttcattgtgaagcctttctgtaataaagtctgttaaaaccgtaacctccttatcatctgcctgatttctgatcaggtaattggtaagaaaaatgagctctataaatgttttaagccgccatctgaaatcattcgctactttatgattcatatcaaagaaatgaatattctcaacgatccatgacagtgctccccgcttaatttcttttatgtacgcttgggtcaaatttttcaccaccttgtctcagatgtgtaggttccaaacagctgataatttacttttgagtggctagatcagagaaattcaaattcgggttttgattgtcttcttggcttggcactacaagcacccagccgctccaagcgaaagtattgcctgattgctctgcatctccggctaacaaatgtgtcgggatcgtgattcttttttcttcttttatttttttaaaattcatatctccatctcctttagtttatagaattatttggaacctacatcaatatattaatcaaataaggtatatattgtaaactagttttgatataatgcttcttttttcactataaataaacagtatataattaccaaaaataaaaaaagcccggactcagtccaagctttcctgcgtaccaaacaccttctcattccgctcaagcattcgggtcagatttttttcaaatacgatttcttcttccggtgataatccggccgcatacaggcggccgctgagttccttcagttcggtcaaaagcgccatcattaagtcctgtacggaaatgtccgtttgcagcaattcacttaatgatgccatcgtttcgggccggatgtcggggtatacgccttttgtatcattgcttttgtcttttaaagcggattgatagaaacgtctgatcaagtcggccctttcactgccgcttttatcggcgcagagataaatttgaaccgcggttccgccccgcagccgtctttgtgagattcccgcgaattttcggccgccgatgctgagatcatagctccccggacagtacgatcctttaatttcatacgcttcaatttcagcattgtacggactcagcatccgccgcaccagctctgtcatcgcctcgtagcctctgtcgatgtcgatgccttttttctcatcttcaaaaataagcgagatattcaatacgccttcatcgagaacgaccgcgaggcccccggaattgcggacaatgacacggtagccttcgtccttcagcaatttcacgccgtcctctaaaaatggaagccgtgtgtcctgaatgccgagcacgattgtccggtggtgcacccaagatcgtgctgtcgcaggcgattcccctttgcctgcggaggcgcacagcgtatcatctattgcgaatgactgcttcgcatcaaaataagggccgaggctggattggtcaatgattctccagctcggctgcatcaataaatcaatcggttgctttcccatctatattaaatccctttcgtcataggcttttcatgcatttattatatcactccgcttaagatgattgaaattggcttttcaaaagagcgataaagatttctttgttttttgtgctctccataatggaagattgaatgatagacagtttccgcttcaaggagaatccttttatctcaagcacggaaatgctgcggtgaagcagatccttttgcagcacgctttttgacaggacggaaaggcccattccgctgatgacggcttccttgacgccctggttgctgctgatcgtcatcaaggatttcggccgcagtccgtttgaatgaaggacgtggtctaaatattccctcgttcccgaacccttctccctcgtcacccacgcttgattttgcaaatctgtaaccgatatgttttttttgccggcgagcgggtgtccgttcggagcggcaatgcacaattcgtcctccataaacggctgaatgtcgagctcgtttttccccgtatgcccttcaattaatccgatatcggcttcaagcatccgaaccgcttcactgacctcctccgtgtttccgatcatgacgtccaggttcagctcgggatactcggcatgaagctttgcgagaagcggcggcagaatatattcgccgatggtaaagctcgctgcgattttcagcttccctttgacataatggtgatgggcgtaaatttcggttttcgcctgctcgtacaaaaagaccatttgcttggcgcgctgatagagaatgtctcccgtcggcgttgtcgtaaagtgcttaggcgagcggttcagcaaggcggtttgaaattctttctccagatttttaatgtgaagactgacgctcggctgagaaatcatcagcttctgcgccgcttttgtaaagtttttttcttccacgaccgcaatgaatgttttcagttccccataatacaaaaagcatcgcccctaattattatttttcctaatcgtttagatcatataaatatattttactaatgattaagaccgcagtaaagtggagttatcaacaaatgggaagtgactgaaatgaagatggtaaagggtgttacagttaccgcaggaattgcgtttgcggctttctatgtcagccgcctgccttttttacaaatgctcggaatgcttgtcctcgcgatgctgatcggcatgctctggcgcgccgttttcggacatcaggcggcattagagccggggattgcgttctcaagcaaatacttgctgaaagcaggcattatcctgcttggcatgagactgaacctggcggatatctatcatgccggctggcacgtatttgcaattgccgtctgctgtatgatgtttgcgggcgctgttgtatacggactgtcccggctgtttcgtatggatcagacaatcagcatattaacggcctgcggcacagcgatctgcggggcggctgccattgccgcgatcgcgccgcagatcagatcaaatgaaaatgcagcagccatcagtgcagccgccgtttcattattaggaaccgtttttactgttgtgtattctctttcttatcatgtattgggcttttcgcccgcggcttacggggccttttgcggggcaacgcttcatgaggtggcgcatgtggcggcggccggcagcgccggaggaaaaacagccgtcgagatggcggtgatcgtcaagctgacccgggtcgcgctgctcgttccggccgcattcatgcttggcatgcgggcccgccgcagcggtaagtcagagacagtttctgccgcttcgctgcccatcccttggtttatcttcggatttctcggaatgagcgccatccacacatcaggcgtcatttctgccacgcattccgcgtttcttgtgcaagtgtcttatgttttaatcggcatggcgatggcggggctcggtttaaaagtccatatatcggcgtttcgtcagaacggctggcgggcgctcgcggctggtttgatcggttctctctgtttatccctgttcggctgggcggcagtgactttctttctataaaaaaatgccggccttcgtaaaggccggcattttccggattacagcgcttgagccgccgtaattaacgcaagattgtagacgtcttccgcattacatcctctggaaagatcgtttacaggcatatttaatccttgcagaatcggtccaaccgcttcaaatccgcctaagcgctgagcgattttgtagccgatgtttcctgcttcaaggcttgggaatacaaatacattcgcgtctcctttaatttcggagtccggcgctttcttctccgcaacagacggcacaaatgcagcgtcaaattggaattcgccgtcaagcgtaagttcaggcgctttttccttcgcaattttcaccgcttcggccactttttccgtctcgtctgatttcgccgatccttttgtagagaagctgagcatggcaacgcgcgggtcaatatcaaacatttgagccgtattggcgctttcaatggcgatttcggcaaggtcctggctgtcaggagcaatgttgatcgcgcaatcagcgaatacatattgctcgtcaccgcgagccatgatgaagacgcctgatgtttttttcacgccttcttttgttttaatgatttgcagtgcagggcgaaccgtatcggcagtagaatgtgcagctccgctgacaagtccgtccgcgagacctttgtacacaagcattgtgccgaaatagttttcgtccaataaggctttgcgggcctgttcttccgtcgctttgcctttgcggcgttctacaaaagcctgaacgagttcttccatgccttcatatgtattcgggtcaaaaatgtcaacgccgtcaagcgtaagatttaattctttcgcttttgcttgaatgtcttctttattgccgactacgatcggctttaataccttgttgcccgccaagttgttgaccgcaaccaggatacgttcgtccattccttcaggaaatacgatttttacatcttttcctgctactttttcttgtacttttgtaaataaatctgccacgatataccctcctctatgttgacaaaaaacgcttacttttacagcatactcttcttcctgttaaattcaaataaccaactttcattatagcgctttcaaagaaaaatcttatttttctaactaatttaactgacggtttgttcacggcttagtttctgacacaaggctatggattattcaaggtttctccacagctgaaacggttaaactgtgatatagtgaaggcatcaatgaaaagatataggagtgaagatacatgagtgagcagcaaaaaacgaacgaagccgcccaaacgcttgacggctggtacgcgcttcacgatttccgcacaatggactggacgtcatggaagctgttatccagcgatgagcgcctgtcgattattcacgaatttacgggactgcttgaaaaatggggcgtcgcccaaaaagaaggcaaaggctcgcaaaccatctacagcatcgtcggacagaaagccgattttatgctaatgattcttcgcccgacaatggaagagctgaacgaaattgagcttgaatttaataaatcaaagcttgctgaatttacaatcccggcttattcttacgtgtccgtggtggagctgagcaactacctggctagcggagaaggcgatccgtatgaaaatccgcatgtccgcgcacgcctgtatcctgagctgccggaagcgaaatacgtctgcttctatccgatggataaaagaagaaacggaaatgacaactggtacatgctttctatggatgaacgcaaaagcctgatgagaagccacggcctgatcggacggagctatgccggcaaagtcaaacagattatcacgggatctgtcggttttgacgattacgaatggggcgtcacgctcttcagtgatgatgtgcttcagttcaaaaagcttgtctatgaaatgcgctttgacgaagtcagcgcgcgctacggcgaattcggttcattttttgtcggaaaccgattgtctctcgacacgcttccgcagtttttacacgtgtaatacccacccgcctctttggcgggttttcatttatcagaatttaaataaaatttgctattttcttcgtttttttttacgatgtaaaagagattccattttggtaaaggggtgcagacagttgtctaaacgaaccgcatttattatgggagccagtcaggggatcggcaaagcgatcgctctgaaactggcggacaatggctttcataccgtcattaattcacgagttcccgaaaatattgaatccgtaaaagaagagattctcgccaaacatccggatgcgggcgtcaccgttctggccggggatatgtcggatcagaagacgagaagcggcatttttgaagaaatcagatcaaaatgcggacggcttgatgtattgatcaacaacataccgggcggctcgccggacacttttgaaaactgcgatatagaggatatgacaaatacctttacgaataaaacaatcgcttatatcgattctatgaaaacagccgcagcgatcatgaagcagcacgaattcggccgaatcattaatattgtgggaaacctatggaaagagcccggcgccaacatgtttaccaacagcatgatgaacgccgctttaattaatgccagcaaaaatatcgccattcagcttgcgccttttcacatcactgtcaattgtctgaatcccggatttatcgccacagaccgctatcaccaattcgtgcagaatgtcatgaagcaaaacggcatttccaaagcagaagcggaagaacggattgcctcaggcgttccgatgaagcgtgtcggaaccgcagaagaagccgcggcgctggctgcctttctcgcctcggaagaagcctcttatattacggggcagcaagtgtcggccgacggcggaagcatgaaaagcatataaaaaacatcccgctgtcagcgggatgttccttgtaatgaagcaaaggacaaaccgagcttttgaatccgcaaaacgaattccctcaagtccccctgcttggccaccattgatattctgacataacgctttccgcggctgccgaaaatctcgccgggcgtcacgacaacatgggcatgctccagcagataatccgaaaattggtgtgaagactcgaattcattcggaatttcagcccagacataaaaagtccctttcggcttttcaatactccagcccaattccttttcacataactcagtgaaaaaatcaatccgttcctgatatgtgcgcttcagccgttctgtatgttcagggcttcctgacagcgccgccgctgccgcctgctgaaggccgccgaacataccgacgaatacgtgatcctgaaattcattgaccgcctgaatgatcttttcattccccacggcaaacgccattctccagcctgccatattgaaggttttcgaaaatgaatacagctccgcgccgaccgtcttggcttccttcgcctggagaaaactggccgggttctgatcaaattcgaacgcgccgtatgcaaaatcgtgaatgagatggatgtcatgttttttagcaaacgccgccgctttttcataaaacgcctgatccgctgtcgcgcccgtcgggttattcggataattcaaaaacatcagctttgcttttttcaggacggcgggatcaatctgctcaaaatccggcagatagccgttctctggatgaagcggcatctcatgcagctccgctctggccattgtaattcccgataaatactcagggtagccggggttcgggactaaggcgatgtcgccgggattcagcaggcattgcgtcaaaacgtacaaacccgcctttcctccgccgaacagcgcaacttctgtctccggattgaccgatacaccgtattctctctcataaaattccgcgatggcttctttcagaaacggatagcctctgaacgggccgtatccgtgatacgaaggattcagcgcagcctcccgcaatgattgaacgatatgcggcggagtggggagatcgggattcccctgccctagattgatgatccgggcccccgttttctccaactcttttaccttttgaaaaacgagcgaaaattcctgtttcggaagtgtcttgatgacgtcggacggtatgatttccatctgaaaggctccttataaatgaatttgctccgattcgttattccgttctgaaaacgatttattgaccagttttgtatgcagaaacaacccgctgaccagaagcacgataaacgccatgataaccgccgcatctacaatgttgatcagcatggaaccgacggcgatgcacaatccgatggacgcctctgccacggaaaagatccggccctgaatctggttcgccgcattctcctgaactttgaccttcgccagcacctcgccgtattccattgcaataaagaaaagaatggcggcaatgactgacacggcgaaaatcggggtgaacaaaaacagcgcaagcgagacaattgataacactgtaaaatacatcagccctttattattgttaaagccccatttgctgacaagggcggcgccgataaagccgccgaagccgatacagaacgtcagaatgaaattgccgatttccccgtcgcctaaaaagcggctgacaatcggaaaatagctgtagacgacaccccataacagcgccatcgtaatcatcgtaaacatggcgtttaacacgaaagcatttgttttgatttccttcaggccttccttaaacgactgaaaggcttctctcacgttttctgactgaatcggcacgtattgaagcttaatacggctgatgaaaaacgcggagacaaggtaggttaccccgttaaaggcgacggcaagctcgacagaaccgcctaatagaaaaagaccgccggctgcggcgccgacaataatcgaaatcgtcgtggctttggcaaataaggtattgatatttttaatatccgcttctaaagacgacatgaccgcgagacgggccgggttaaaaaacacgccgcttccgtaagagacaaacagcagcgccagaaaaagcagcggatattcgcctttcgggagaaatgtcagccccaagaagatgacacctctgatcacatccgtccacagcatgattttcaccctgtcgagccggtccacaagcacgcctaaaaacggctgaaacaccatcggaatgctgcggaccgcgatgacgccggacgtcacccagtagtcatgatagtatgtagacaaaatgagcagggccgggagaacgcaatagtctcccataaacgaaagcgcctgcccgaaaagcaaatacttagagttcggtttcagctgtttcataccgataacgcatactttgcagtcagcttcgcctgctgctgaatttgtttgattgattcggccacgtcgttcgaattgcttcctttcagctcaaacgccgcaatgctgttgaacgcttcgaacagccgcagatccactgacgtacccgcctccgccgctgagaaagaaacgagttcagtgtctccctttaagacgccgtcaggaatttcaatgctttcaatgacgaaatcgacaaccgtctcaggcagctggccgttctctttgaaatgctgaggatacaagtggcagtctgcgacatagcatggctcctgctctaataatcctttcggcagatcggcttcttttccaaaacagagaacatccaataatagctgcgccatatcgacgccgaagacctttttaatattcggaatcatattccatcccgcgaatctggccgctgactcaatcagtccggcttcccggtttttcattaattttatttctgtatgcgttgcacagttttcgaggccgagtccttcattcgccttcttggcagcttcgacgattttccgcttggcgtcatcatccaggatggacggcgtaatatgcgctgtctccgtgaatccgatttgcggtgttttatcatggatcgcgacggggaagtattctccgtcggccatgatgccttcgatactgatatagtcggaataaccgcttgtttcgtaccagtcatcatactcgccctgcaagaattcttccgcgataaacggcgcttcaaacgtgaccgctttcggtacgttaatcgatttcaagtactcattgactctgttgaattcagcttcggccgtttccatctctttgataagcgtcacgccgatcgagctcgccagatatgtaggcttcagaataagcggcgttccgatttcctgaagcgcggcgcggaaatcttccagggtcgtcacccgtttgtttttgatggatttgacgccggcccggttgaaggcggctctcattttgtttttatctctcgcgttttcagcggcctgtacgcccgctccccgcaggccgagacgtttacacgcttttgccatcggagcgataaacagttcattgttggtcgtaatggcgtcaaccgcaaacatgtcggccaccttgacgatttcttcgacgacttcttcctcaggtttgtcatgatcttcatgagcccagtaaatcgaatcgggatgctcaaaatcagccagactcttaaaatagtctttatctttaatgaccgcaatcgagtatttttcaattaaggccgcatgagaggctgtaattgcaaagggtctcggaataaagctgacgaggttgtatttttcggctgcgctttcgtaaaacatatgcggcgggcagcccccaagatcagcgataaccaatactgtttttctctccatatgtaacactccttctctattgtgcggtgtatccaccgtctgcggtgatggcgcttccggtcatatagcttgataaatccgaggcgagaaacagcatgacgttcgctatttcctcaggcttgccgagcctcagcagcggattgactttcgctttttcttttttgatttcttcaagcgtgccttcgttattttcaaggaacgacttttcattcaaaggtgtgtcgatgattcccgggcacacgcaattgacgcggatgttgtgtttcgcataatcgacggccatagaacgcgtcagctgcaaaacgccgcctttagatgcgttatatgcgggaatgtcgggccatgcgacgactccaccgacggagcacgtgttaatgatattgcccttgccgcttttgagcatatacttcagcgcgtgcttgctcatgagaaacatgcccgtgagattgacattaagcaccttgttccaatcactcagctccatctcatgaatcggggcgacaatttcgatgccggcgttattgattaacacgtccaatccgccgaacttgtcaaccgctgacaggatggcgttttgacatgccggttcatttgtaatatccgtctggacaaaatgcagcctgtcattattttctttccggatcatcgcttctccctgcgcctcatcaatatccgcgacgaccacatttgcctgctgattcagaaacgcctgaaccgcagcataaccgatgcctgatgcgccccctgtgatgaggacggttttatctgtcaggttcatgactctttcgcctctaattttttcgcttttgctctgttatagcgcggagggaaaaagatattgactgattttgaatccttttcaaatctattgatggcgccgtgatcttctctcgggtcgcagaaataagctgttccgaatgtcatatccactttgcagccttcaatggtcatatcatagccgccgccgatgcagatgccgatctgttcattgcggtgtttatggaacggcatttccccgccgttgcccggaatgttggcaagcatgatttccacccagtcctccacgaagaatgtgacttccataccaggcaataagtctctcgttttaaaaatattcaaaaaataatcctcggggcttgtgtaggtttcaccggctttaaggcgtttaatatcaatagcgatcacttcttgatccgtttcatttcttgcgccgtgtggcacataaggaggcgcgatataggctgattccagcgccgtcatctttcttgtgacgtctccgactgtcatggacagctcgccggaaacgacaaggccgatttggacttccttatgctgatgcggttcgacgtttgtatgcggcggaacgtaagagagcagaacttccgtatcgcctctgacggatgaatattgtcttactccgttttcccattctattaatttaggcgtcgggaaataaagttcctgcaagtcttgtttagttttcatcatgaatctctccttttccgaataatgaccagctcatgggaatgcttttaaatgtttttacaaattgaaggccgtacttttgtctggccagttcatttgtcagcgcgatgtcggacaaaccgtccttcactctttttgcggctgcgcttgttgagttcaccagatcaaacgtgacatctttacgggtaaaatacttaatcaaattgataggagacgggtgggatacgataacagccttatcaagcatgtcatcggtatattcaaaatcaggccggacagccaggccgtacattggggtgtcgcacctgaaaatttgcagaagctgcagatccggtctcatgtagaaatgcttaataccgtcatacgcgtgaggcacaattgtgtattccaacggactttgaagcgttttttcaatgcacgattcaaatgtatcatgcagagataacttgctgttcaccccttggaggagggtaaaattggtgatgaagttttttgctgcgtactcactgcttgtcccttcaggaccgagcgtgttgatcgtaatcagtttagatattgaataagccttgcttttcgtctgaatgctattatccaatataatcatgagcaccaaccaatctgttaaattttaagtaaatattatccatagagattcaaactgtcaatattatttgaaaatattgataattattcctatataatagaaaacaccttataaactaaggtgttaaaaattaacatttacaaaattatagaaactttattttaccgatacaatgattggtcagccgtatgctcatgtctgccatatcttctgtaagcaaaaacgctgaggccaaagccgatgagggtgacggccgcacagataaacccgacagctgcatatccgtatccgacgtagaccggacccatgacagccgaacccagggtcacggccaaattggacgccagactgtagaatgccatgattttgccccggcggctctgtgagcaatcgcttaaaatggtgctgagcaaggtcaccgtcaggctttgcatcaagccccagacgaataacccgatgaccaaaaacggcattgatgacggcgcataagcgagacaggcaagccatatgctgataacggccaatgccgcgatcagggaacgcatttttcccgccttgtcggcgattttccccgtgaacacactcatggaaaacccgattccgtacaccatgatcatcagcccggaagcggtatttcctcccggcagcacgcggtgaagatacgtgccgagaaatgaatacatgccgtaaaaaccgatcatgttgcaaaaagtgatcgtgaggtatacaggaacacggggcaccttcagcgcatcccggaaggtgcctgcctgccgtccgctttcctcttctgttttgtccccatccgccgtgctgcggcgcgcctcaatgaaaatgagcgaagcaacgaggacagccatcagggcgaaaatccaaaatgtccaccgccaattcaaaacaccgccgataaaagagccgatcggaacaccgaaaatcaaagcaagcgaccagctcgaaacgatcagacccatcaccttgccgcgatgcgcataaggcacacggtcgccgaccagcgcataagctgtcggcacaaacgcacccgccgcaagcccggaaagcgccctgcccagaaagaagaaaaagatattgtgcgccagcgcgcagatcaccgtgccggccgtaaatataagaagccccgccatcaggctgagttcacgggaatatttatctcccagcggaaccaaaagcggcgccccaataaaaatcatcactccgtaaatactgatggaaagcgccagcacactgacatccgagctgaaagcctgcgctaaatccggaagcagcggggaaatcaccagctcttcagaacccgcggcaaatacgcctaatgtcaaagcaagcgcgagaaagaccggaaatcggcgtttcgtttcgatgtgttcggtttgtttgctgttcatgctctttaaacacctcttccgtaaaacttttctaccttttgttgttttatagtttagcatccttatttttcattttacatttcatacgaaaactaatttcatttttttatttacattcagattttaaataaaatatttagtttatattcagcaaatgttataaaatatgccatccggttatgctatagtgatagaatcatttgttaaggtgggtcatgaaatgaataacggttattcaaaggccggccgcgcaggcctcggcatggtattgattctcgggacgctggcttcattcgggccgctttcactcgatatgtatctgcccgctttgcctgaagtggcggccgacctccatacgtcagcgtcacttgcgcagctgagcctgacgttttgtcttttagggcttgcgatcggccagattgttgtcgggccgctcagtgatatgatcgggcgccggaggcctctgattctgtcattgctgctttatatgctgtcttctttattatgcgccttcagcccttctgtttcgtttttaattgtcatgaggtttattcaagggttcacaggggcggccggaatcgtcatcgcacgggcttccgcacgcgatatgtattccggaaaagaattgacggcttttttctcattactgatgcttgtgaatggggcggcgccgatcttagcgccgattacagggggatttatccttcagttcgccgggtggaaaatcgtgtttatcgtgctggcggtgatcggctgtatcatttttgccgcagtaattacggcattgcctgagtcacttccgcctgaaaaacggacaagcggcggactccgggagacgctgatgacgtttcggggcctgctcggcgaccggatgtttatgggaattgcgctcagccaggcgtttgtgatgaccggcatgttcgcatatattgccgggtcgccgtttgtgctgcaaaacatctacggcgtgtcagcgcaaacgttcagcttgctgttcgccgtaaacggagcgggaatcatatgcgctgctcaaatcaccgggcggatggccaaaacacatgatgaacggaagctgtttatcgccgggctgttcattgccgtcatcgggagcatcgctttgcttttatcgcttgcattgggattaggcctgacagcggtctgcatttctttatttattattgtctcttcagtcggggtcgtcacgacgacaggcttttctttggctatgcaaaaacaagagaaaggcgcggggagcgctgcggctcttctcggactcctgccatttatcggcggcgcggctgccgccccactggtcggaatagccggagaagaaaacgcctggccgatggctgtcagcattttcggttttcagctctttgccgttctttcctacgctctgtcggcaaaacggaaaacaaagtaaagcccgccgcttattgcggagggctttcttcttatcctgcggcgcctttttccgaagaagccggctcacgcttcaagcgttttttgataccgaagtgataatacgcgtaacagatgatcatcagcgggacgccgcagtacagaccgatacgctggtcggggataaagatgagactgattaagatcagcccgtagaccgaaaatccgagaatcggcacgagcggataaagaggcgttttaaatgccaggtcttccagatttcctccttcagcgagaaagcgcctgcggaaaacgaattgtgaagcgcagattgacatccacgcgacgacggtaatcatacccgaaatggaaatcagccatacatacaccgtttcagccgcgactacacttgtcagcagggataaaccggagatagcgatggtgatggaaagagctttcagggggacgccttttttcgtcagtttcgttaagaaagcagggcccattttgctttttgatagtgaccacatcattctggacgaagcgtacagcccggaattcgccaccgacagcatggcggtcagaatgacaaagttcatgatatcagccgcatagggaacgccgattttatctaacacagccacaaacgggctttcgatgacgcctgccgtttggtacggcaaaatggatacgagaacaaacatcgccagcacaaagaaaaacagcgtccgccatatgacgtttcggattgagcggggaagcgtcttttccgggttttcgctttctcccgaggcgattccgaccagttcggttccctgaaaagaaaaattcaccatgacaagcgtaaacagcacagcctgtgccccgttcgggaaaagccctttgtccgtcataaagtttgacagatacggcgccgtctgaccgccgttaaaaccgacaaagccgaacacggcagcgcagccgagaataataaacaatacaatggccatgaccttaatgctggaaaaccaaaactccatttccgcaaaactccgcgcagacagcgcgttaatggaaaaaatgacgacgccgaatacaaggcaccacacccaaatcggaacgtccggaaaccaccgctgcattaaaatccccgccgacgtcagctcaagccccactgtattggcccagctgaatgcgtacatccatccgatcgtaaaacccgtcgacggccccaggaactttgcggcatacgcctggaacgaaccggcgaccggcatggcgactgcaagctcccccaaacaaagcatcaccagatacattaaaaatccgccgatcacataagccattatcgcgccgatcggccccgcttcactgatcgtaaaacctgagcccagaaacagccccgtcccgatcacgccgccgagggcgatcataaataaatgccggcccttcatcgtgcgctgtaattcattttgattggtatctccctgcatatacatcccccttatcccgttatgtcagccatttgtgcgtatgtctaatcggtagctgtgcaaaaggtgcagcgtcgtctgctgaatgagttcaggcagcacatggaatgtgtacggtttatacacccgttccgtccatttatggccgtccttgccatacacccctatattgaccgatggaatatttaattccctgatttctttaaaaggaatcatgccgatgacatcccatcccggaaaattatcggtaaaggcggagacctcagcgtctgtttcatgcagcgataagaagcttccgtccgctaaataagggaaaaactttttaaaagcgaatgtttctcctgttgacgccgctgttttatcgacggcttcttgaatgacatgctgcaaaagccggtcccgcgtgctctcttcctttaaataattgtgcggaaggtaaggcggcgcatagaaaataatgaccttggctccttgctcaggatcaagtttttgcagttcctctacggctttaaagcatctcatccgcagttcaagatgttcatacgttttaaacgtctgctctatacactgcgccgggtctatgccgcggcttctcagccttttcaggtaatcttccagactgtacacttgaacgttccatgagatctcttttttcggaaggttcgttcttctgcaatattcgtcgtaataatcagataatttttgttctgtctctttgcaggcttcgtcagccacggcagtcagctgatccatgatttctttggcggttttttcgtaaataaaataattaaaatagacgtagctgctgacggcggtctgcacgttatacgcttccttgttgtcacgctggtacaggcaggtcggcggaagcacaagctctccttcaatgttttctgccatatgaatattgttgtggattcttctggtgatttctgacgcgatcaaattcgggtctatgccggacagcgtatccccgacatgcacttcccgcccgtaaatcgcaaagcaaggcaaaagcttcccggcggcgcccgtgtatatgtaccgtgtcgtgtcaccatcatacagcggcgtgataaagtcggtattaatcgccgctaaataacgaagctgtttttcttgtttcagccgttttaattcagaaatgcttgttaagatgccggaatgctggctttcttcatccgggtttgccatgaacagaatatggccgggcaattgctcacgccgttcagaaaagtgaagcagattggcgagatgaacggcaataccgctctgcatatcaaccgatccccttccgaacatccactcgcctgagcgggcgtcccgctgcacctcccgatcaaattcatagctcgagaagtactccgcgagacgatcggaatcaaaagcgatatcttttaaagggccgaaatcctcaatgccgaccgtatcaagatgggcgtgataaatgaccgtattcaggctgtcaccgtttccttcaataaacgcgaaaatatttttgcggccgtaagggtcctcagggatcgcctgctcccacacatgtgacgggttgtcctgaaagtagggaaagctcttaatcatatctttgatatagtcggccttctttccttctcccaatgtgccgttaatgctgtttaatgccaccagcgatttcgtaatggcttctattttttcctccggaagcattttgctgagctgctgatacatgtttcatcctccttaccctcatatagagaaaatagcgcgactctctttgtcatcgcgctatttccgaaagattaataggcttcagatgttgttttcgcctgcatatgaagaatcagataatcaggtcctccggcttttgaatccgttcctgacatattgaagcccccgaacggctggtatccgacaatcgcacccgtacagccgcggttgaaatatagatttccgacgtgaaagtcttcacgggcgcgttcaatgtgcgcgcgggttttcgttaacagagcgcctgtcaggccgtaatccgtattgttggcgatctcaagcatatggtcgaaatcccgggctttagagatcgcgacgaccggcccgaaaatttcctcctgcatcaggcgggcgttttcatctacatccgcaaaaatagtcggctgaataaagtatcctttcgaatcatcaccttcgcctcccgtcagaagttttccttctgttttgccgatttcgatataactcatgactttattataagacgcttcgtggatgacaggccccatgtatgtatcaaaatcttccggacttccgatggtgagtgattttgttaaagcgacggctttttcgacaacttcatcatagacgtcctgatgaatgaccgcgcgggaaccggccgaacatttttggcctgaaaatccgaaagcggaatacacgattgaggaagcggctagatcaagatcagcatctctgtctacaagcaccgtatcttttccgcccatctcggcgatgacccgtttcagccatttttggcccggctgcacttttgcggctctttcatagatgcggcatccgaccgcacgggagcctgtaaatgacacaaatctcgtcttcggatgctcaaccaggaagtcgccgatttctcctccgtcgcccggtatgaattggagcacgccgtccggcagacccgcttccttcatgacttcaacgaatttcgccgccacgacaggcgccgcatccgccggtttcagcaatatcgtgttgcctgttacgatagccgctgccgccgttccggccataatcgcaagcgggaagttgaatggagaaatgacgattcccacaccaagcggctcataatgatattgattaaattctccgtcacggctctttacaggggaaccgtctttcagcttcagcatctgacgggcgtaatactctaaaaagtcgatcgcttccgccgtatccgcatccgcttccttccacggttttcctgcttctttcacaaggtacgcggaaaattcgtgctttcttctccggatgatcgccgccgctttaaacagcacgttcgcgcggtgttccggccgtacttttttccatgtttgaaatgcctcaagcgccgcctgcatagccttttccgcaagctctttgccggccgccgatacagtgccgatcacttcttttttatcagccggattgacggaaacgatttttttatccctctcaatcgattcaccgttgatgataatcggataatgcttgcccagctgtgaattcacataagccagcgcttcttgaaacgattgtttatttgtctcttcctgaaaatttgtaaacggttcgtgtgcgtatgaaactgtcattagaattcctcctcgtattttgtaatgtgtgctcacgctttatgaagatgcaagaagcataccagcataacaagctgtgataaaaaaaagaaaatctctgccgaaagcggacgaagcttgtccgaatctgtcagcttcatccagaaaacgcaaagaaattttgcgatcctttatatatacggcgcaaaattcctttgcggataacacttatacccagccgcggaaacgggcggcttcagccgattttctgatgcctgtcatatatgcggccaaacgcatatcgaccttgtgggtatgcgctgtctgataaatggattcaaatgaattcaccataacactgcgcagttttccggcgacttcctccgctgaccagtaaaatccctgattattctgcacccattcaaaataagacactgtcacgccgcccgcgcttgccaaaatatccggcacaagaagcacgcctctttcattcaggattttcgtggcgtcgatcgttgtcggcccgttcgccgcttccacaatgatcgaggctttaatgttatgagcgttttcagccgtaatctgattggagatcgcggcaggcacgagaatatcacagtctttctccagcagctcccgattcgttatgatatctgagaaaagattcgtcaccgtgccgaagctgtcccgcttatccagcaggtaatcaacgtcaaggccgtcaggatcatacaaagcgccgtgggcgtctgagatgccgatcaccttggcgcccgcgtcatgcataaatttagcgagaaaacttccggcatttccgaacccttgaatgatgatgcgcgcattttccaatggaatcccttttttcttaacggcttcctcaatacaaatcgtgacgccttgcgcggtcgccgtttcccgcccctgtgaaccgccgagaacgatcggtttgccggtaatgaatcccggtgaatcaaattctctcagccggctgtattcgtccatcatccacgccataatctgcgagttggtatatacgtcgggagccggaatatcctttgtcgggccgacgatctggctgatcgcccgcacatatccgcggctcagccgttccagctccccgaatgacatcgtccgcggatcacagatgatgcctccttttccgcccccgtaaggaaggtttgtgatgccgcattttaaagtcatccagatggaaagcgccttgacctcttcttcactgacttcagggtgaaaccgcacgcccccctttgtcgggccgaccgcatcattatgctgtgaacggtagcccgtgaaaacctgtactgagccattgtccattttgaccggaatgcggacggtcaaaagccgcatcggctctttcattaattcatacatattatcgggataccccagtttacgcagggcttccttaatgatcgattgtgttgacaagaacaaattaagaacttctttttcttcatctttctgattgcttttagaaagcgggttggctgacatgttttatcacctcatcgtattttacgtgtaagcttcaattaccggcagaacaaaatgtaagcgcttttacaccaagacccatcagtccctttcacattgtcgttacgcccctttttatatgcaagattcatgccaggattttgcgcataaaaaaagaggctgttgtgcagcctctttcatcccggattaacgcgggtcaatgaccagttttgtttcggcgtaaagactgccggcacccaaaccgtttacgtaatcgcctttgattgtatacgtgccggcgcgcggaaggtttttacgcaccagaacgagattgtattcagtcgctcccagcaagtcaagggtaagcgggagtctgaccgtttttccatagttgagaatttgcgtttctttcaatgttcttccgtttacagagtccctcacagtggcgttgaacccgtcgggaaattgaaattcaatggcaccgacggcaagcagcgcattcggcttgtatgtgacttcaatatcagacgtcgcgtattctttcgtactgttgatggttttcgcttcaataacggcagattgggcattcgcatgaaaagatggcaagaacacagctaaaaatacagcagcactgatgaaaaaagcagaaaatgattttctttttaacatcattgattcctccagattatatgggattcagagcgtcctctgccggaaaagcgtgtctgatgattccattcgcgcgaattggagtttctcttttcctgagaataatctaccacctttacccatgtaagtaaattgttttttaggaatattctatcttttgtttttacaaggttcacatcagctgaaaatcaaaaaacgaagacatccgctgtctccgtcttgtgcgttaccgatgagccgtcttccagtcaaatccgatggtttcatcattccacgggattcttttttcgtcaggctgatccggattataggacattgtcgtaaaataaataatagtcagcggggtttctcccagcactctgtaaccgtgcgcgactcctttgggaatgagaagcagcatcggattgtcttctcccatgtagtaaacatccgtttctcccttggttgctgactcttcgcgaaggtcatgcagcacgacttgggcgtggcccgtcgggaaaaaccacaggtcatcctgtttctcatgatagtgaaacgctttaatgacgccgggatagctttttgaccaggaagcctgcccgaaatgttccagaagttgttcatcgtcacggacgagttctgagaaaaaacctcggtcgtcactgtgtttgatcagctttttgatttttacgccttcgatcacttgcactgtccctccctttgtaaataatcccgcagcgcctcccgccaatgcctcatgccaagcccctgccgttcaatcgactcaaggcttaacaccgagtaagcgggacggggcgtcttatttccgtattcctccgtcgtgacgggaagcacagcggcggtcctgccgctttcttcaaaaatggccttggcgaattcataccagctgcacactccgctgtttgcggcgtggtacgtgcccggcggcctgtcaaagagaccgattaccgtttcggctaaatcctttgtgtaggtcggtgcgccgacttgatcgttgacgacacgtacttgatcatgtgtatccgcaagcttcagcatcgtattgacaaagttgttcccgccgctgccgtatacccacgatgttctgataatggtgtggttttttcccgttaaccggatcagttcttcgccgagttttttgctttttccgtaaatcgttccggggtctgcgggatcatctgtctgataaggccgtgttcctttgccgctgaagacgtaatcggtgctgatgtgaataaatctcgctccggtattttcagcctcaagcgatgtataataggctccgattccgtttattaaatacgctttgtcgagctccgtttcacatttgtcaacggaggtgtatgccgccgtattgacgacgatatccggcttgtaatggctaaacgagtgccgcaccgattgctggtcggatatattcatcatcgcttttgtcagggcgatgacttcatacccttcccgcttcagtcggcggcataactcccgccccagctggccggccgctccggttactaataccttcgtcaatcggatccccttctttccgattagtcttggctgcctgtataccagcgaatggttcttctcattccttcttcaaacgtgacgtcctgccgccagcccagctcttgtttcagctttgtggcattgatggcgtaacggcggtcatgcccttttctgtcttcgacatgggcaaaccgttcctcgactccgagctccttcatgataaaagccgccagatctttattcgtccgttcatttccgccgccgatattgtaaatttcgccgagcgttcctttttccagtacaagtttaatggcgcggcaatgatcttcggcaaacagccagtctctgatctgcatcccgtcgccgtacagcggaaccggcgtgccgtttacggcgtgtctgataatggtcggaatcattttctcgtgatgctgataaggcccgtaattgttgctgcatctcgtaatgatggcgggaagcttatgggttctcacataagacatgacgagcaggtctgagcttgccttgcttgcggaatacggattattcggcgaaagcggcgtcgtctccgtaaaagcgggatcatccggttccaaatctccgtacacctcgtcagttgaaatatgaatcagtctgccggcctttccctgtaacaccgcgtcggccagtcggtatgtgcccatcacatttgttgtgataaacggttctgcctgatttatgcttctgtccacatgagattcagccgcaaaatgaatgacggcgtcatacatttgggaaaaggctttgtcgatgtcctcttttttagagatgtcaccttttataaaacggaaacggccgttcttttttaaggcttctatttcaagcggcctgcttgcatacgtgagattatccaggacggtaatctgcgcgtccgtttctttcagcatcatgtttgtaaaggtgaggccgataaatccggcgccgcctgtaattaaatatgattttggcatgattaatgttcctgtcctttctgtatcgcctgttgcgccaggcttccggcgaggcagagcgattcatgcgtgcccgcatccacccaccagccctttaacacatcatacgtcagctcactgtgttcaatgtataaattattgacatccgtaatttccagctcgccgcgttttgaaggggaaatttgttcaatataagaaaacacttcggcatcatacatgtagatccctgtgacgcataggctggtcggcggctgctccggcttttcaatgatcgacttgatccgtttgttttcctcatcaatctcggcgatgccgaagcgctcaggatcatcaacttccttcagcagcactttcgctccttttccctgctgtgcgaagcgttccgtataaggttttaatgaatcttcaaaaatattatctcctaaaagcagaatgaacggatcgcgtcctgtgaaccgctttgcgtacgataaagcgtccgaaatgccggatgcggcgggctgaacctgatatgtgatcgagacgccaagctcttctccgttttcgagaagtttatgaaattgcggaatatactctttttgcgtgatcagcaatatatccttaattcccgcttcttccagcttcatgatcgaccagtaaatcatcggatatggaccgacagggagtaaatgcttattgaccgctttcgtcagcggcataaggcgtgagccggtgcctccggctaagataacacctttcacatcaacacttccttacgtgtggttttatcacaattcaaaaagaatcgccgccgcccgtttgatgcctctcccgtcaaccagcggcgttccgttctgatgaagtccgagccgcatctgataatcagcggtcagctcagacatatgccgagcaagaacgtccgctgacatgcgttctccgaggccgagatgaacggcggctccccgtccggcgaatttttctgccgtcacggtttgatgcgccacttgagatagaacgatgcagggcacacccgtacaaatggtttcatataaagtaatgccgccggacacgacggccatatcagcctttgtgagaagtgcggccatgtcatttgtctgccttaccaacccggcataaggcatttgcgcaataagcgcacgcacgtcatcagcgtgagcagcggcgccgcccatgacgatgatcacttgtttgcgctgaatatccggaatgcggcggcatgcttctatcactttaaagacaagcttcttagggtcgcttcctcctaaagaaaccaaaatggtccgacattcttttctgagctgatagagctgtttggctttttcaaaacccggatgaagaatcatatattccgggccttcatataaaacggtgctgcccattttaaccatccgacttttcagtccgccatatatgccgtttatgacggcatcgcataaatgaataacatgttcccgtttttcttcaaacaagacgatgcgggcagatgagtgctttttgatttcttcaagccagtcacacggtatatcgagcagatcgaatatgagcaggtcaggagcctgccggtttatttcccggacaataaattccttctgtcccttgtcaggtttgatgatcacttcccatttgtcagaagaaagataagaggaagcttctttgttggtgtaaaacgtaatggagcatttggtcttaatggcatcggcaagcagtttcatccggacggcgtgccccatgccgatttcatagcccccgtctgcgaatatcaaaacccgcatcttaatccgcctctttttgccggatcatctgattaatggctctgagctccggatcgctattcagcagatgaatcaattcctttgccggaatatcagggcgcgatcctgcttttgcgtacagctcgcgggccagccggtagtcctcttcggtatcgacggtcagccgcaagtgaggagcgcgaagttcctgcgggggttcgggaaagtgaagccgatacctctcaggagattctcttatcaaaagtgtcacatgctcctgatatttgtccgccagcgttttgacggcgctcagctctgttaaaagatgcgcgtttacagcctcgccgccgatgccgagcggcgtacccccgatatacgtgtaatccgcgtgctggtctgaatgtgctttaatcaggagatcaagcagcgaaggatcgacgaacgggttatcccccgtcagtctgactgcgatggccggttgtactcgttcgatgacttgtgcaaaccggtcaagcacgcgctgctcgctgccgcggtgcacacggtagttcttgctgaggcagtgcgcggacagtatgtcgtcggtcttattgtcagacgtggcaatgatcagattatcccgtgattgatcataatacgcgctttgccgaactcttttgacaatcatatcgagaatggtatatccgccgatcggtttcagtacttttccgggaagacgctcgcttcccatccgtgcctgaatgataaacagaatgtcagccatcataagaactgcctttcgtcaaaaggtcatcccaggtgatgcccgtgtcggcggggatatccctgaccgcacgcgccccgtcagttaaaagttcaaaatacctcgggtgaagcccctgcggcttttggccgggacgaagaacggcaatgttatccgctgtaaaacattcgcctttttgaatcggcgctgttgaaaaaatgcctctgtaagcgaattttctgatatccccctcaattgatgtcgtggttttatgggagcttcccgacagtatttccggcaccggagcgtgatgcccctgtctcagctccgcttcagctgaacggatcgcggcaaccatttcctttaattcatccggattgagggcgaaggagtgatcggcgccgggcaggtttttgtctatcgtaaaatgcttttcaatcagtttcgctccgagcctgacagctgcgcacgggacgtcatacgggtgggcgctgtggtcggaaaaaccgatcacagcatccgggaaagcggcggcgagcatgggaatgacgcttagattgctgtattcgggcggtgcgggatatttcgccacacagtgcataatcgcaatctctttgttcccctcgccggtaatggttttataagcctcctgaatatctgaaatatcagcgcccgcggttgaaaagataatcggggtcttcagccccgcgacatatttcaataacggcagatggttcagctcataggaggcgattttaaaggctgacggagatgtcgcatataataagtccgcagagccttcgtcacataccgtgcttaaaaacagcacgccttttttcttacaatagtcaagcagcggttctatccattcggcgggcatttccattgattgcactaaagaaaatattgagacgtctttacccgctgcggttttgtacaagccggggtctttctgatacattttgtccgcctgaaacatttgaaacttgaccgcatccgcaccggcctcactggccgcgtctatcaattcaaacgcctggctcagttttccgtcatgattaatcccggcttcggcgatgatgaaaacgggcgaaccttcgccgattgacttcgatccgattttgaatgatgccatcagtccgcctccttcccgggccacacatgataatagtaataagacgcatccgctttaaatcccattctttcatacaggcggatggctcttacattgtggagctgcgttcccgctgatacagtcttatgctggaagcgcagtgattgttcaataatgcgcgccgctaaatggtatcccgcgccctttccttcaaatcccggctttaccgccatcagatcaaggacaaattcatcgcctttagacagcccctgaacaaagcccacggtctctcccttatatttggcggcgaattgtaacgaagccctgccttccgcattattccgcgcccactcttcaaacaggcggtttgcactttcgtagctgagatgagggtcttggtaatacctgctttttgtaaaggcgtcgcgggccagccggctgatcgcttccgtgtcgccgggtccggcttctgtaatctcaaacggcggcgcactgttataaacacgcaccggactgacgagcttgaacaaactcccgacaaaacaggcggtcgggagctgctgaacgacctgcatcgctccgacatcttcagccggtattttaataaatataaaatcggtgccgtccgcccgccttgaggcgtaaaactcctgaaacagccttttgagctgcccggtgctgtttgcggctgcgagcttcacattgatgatttttttttggaacaattgactttcccacgaagagttttcgtataatatcacgccttgaaggctgttttcttccaataaacagagcgacgattcataggcctccggctgaatgcccttttgatggagaaaggcttgaatcatgtcctgagtaagattttccctcagtctgtacacctaatcagcccctttgatgatatccgtaacggctgcaatgacgtattcaacgtcatcatctgtcattgacggataaagagggagtgatacggtgcggtgataatacgcggccgcggccggaaaatcagtttccttatatccgtatgttttttgataatacggatggaacggaaccggaataaaatgaacgcttgtgccgatattatattggtctttcaaagcggaaatcagatcgttccggctgattccggcttcctgctcctctacttgaagaacatacaaatgccatgcatgccgtccgtcatcactgacatatgggacggtcagccctttcatgtctctgaaggcgtcctggtagcgggccgcaatttcggctcttctttcctgcatgctgtcaatccgtttcagctgatgaagcccaagcgccgcctgaagatcaaacatattcattttatagccgggcgtttcgacctcgtagtaccagcttccgtttgaagaataacggttccacgcgcctttgctcatgccgtgaaggctgagcaccctgatctggtcggcaagcctgtcatcatccgtcgtcagcatgccgccttctccggttgccaggttttttgtcgcgtagaaactgaatgccgtcgcgtccccgattgatccgatcattttctgtttataagtggtgtacacggcatgggccgcatcctctaagacaaacagctgatgcttttcggcaatggccagaatctgatccatctcacacgactggccggcgaaatgaacgggcacaatcgcctttgtctgcggggtcacagccgcctcaattttctcagggtccgcattcaaggtaagcggatcaatgtctacaaacaccggaactgcgcctgtatgcacgattgtattggctgttgaactgaacgtcacggcagacgtaatgacctcgtcgccgggaccgatccctttcgctttcagggccaaaaacaacgcggcggtacatgaattcagcgcgatcgcgtgctttgctcccgtccaggcggcgaaagctttttcaaacgcctccactttcggtccctttgaaagccagcccgtttcaagcgtatcaataacctcctgaatttcgtccttcccgatcatgggcaatgaatagggaagaaaagatgatcttttttgcaccattttctttgcgctcctatcttttttatgaagggtcaacccgtctgaagtcgactccggttttttcctgaagcactcggcataaagcggccagcgaatcctgaacaggatagttcgcggcgataaaagtgcggcgcgccttttctgccttttgatattcgtcggggctttcgcatacccgaatcaattcctgagcaagcgcctgcgggtcctcaaaagcaaattccccgagagaatgataataagggtattggcgggttcccgctgattttccgatcagtacgggtttctgaaacagcatcgcttcaaggccgaccgttgatgtctgcgtcaccgcggcgtcaacatacgggagaatatcataaagccccatttcttttttgatgattttgccggctttatatttccgcagcacctgatggtaagcatccagcttgtttttgccgatttcccacggatgcggtttaataataagctgcatgttcttatgcttgatcagttcttcaagaactcccgtataaaattcatcagagaacggctgagtggcgatcagcaccgtccgctttgacgggagaaaggaaagctttcggtaaaacgtgtccttatctatcggctctcttgagaaaatctcgtcgaaacggggatgacccgtgatgatgatttgttcctccctgcagccttttgctttataccactccgcttcataagccccgaacacagcctgatagtccgtaaacacgggcagaaacgcttcatctcccatgagcgccccatgctgaagacagatgctgacggcgttttttttcgcgcacatcagcgccagcacacggctgtaaatatcctctgtcgtgccgactacaacggcggaaatgttctcggccgtaaacaaaatatcaatggcatcaatcgcttcaataaataacggaatgtctttatacaaacgctcctgaaacgctctgtttccgaaagcgggatggctgctgtgctctttcagaatggaatgggctttttcaatataagggacggggttcccttttttgtccattcccgtcagctccaatttgctgataacgggcagcccgtgatgatcaggaagactccatctggctaaaaccgccgttttcgccggatcaaactgccggtagtttccctcggtgaatcgaaggtggtcaaaatgcagaatgacttttccgtttaccggtttctcatctgttttcttaatggtttgcttcttttgatcaaaataagactgaatattggcttcaggaatatgccggtcagccgggccgaaaagctctgggttctgctccatgctctcccgaagcgccggactgatatattgataaaaattactgatcaatgcgagcgggatgtctttgtagcgaagtgaatgaaaaaggtcaatatactgccggtacagcacccaatagttcgctaagtatgccgacaagccctcacccctttccaagcttttttaatgattccctcagctctcggcacgtggtctgctgcggaaggctgttcacaaactcgtttttctccgccgcaaaaagctgataatggatggattgatcggtaatataattgatgtcaagctcctcagcaatcgggtaaaacggataaaaatgattcactctccagaagaaacgggcgtcaccgatccggtaaaacgcggggctttcatcccaataggagccgaatgccgatttgacctgttccagcacggaaaaccggtgcatgaccgaacaatggtcaatggcgcacggcgcattccacacgatccgttcggcgggcctggccgtttccttcaccgtctctttctgttcattcagatgataggttttggaacttgaatacacaacggctttttccgggtcgtcatcaagctctttcaccattttctcaagccggtccggcacatacgtgttgtcgtcggtcgcatacgtcacgtattcgccctccgccatttctattgcctgattaatcaaggccgcatagcgtgttttttccgttctttctttgacgcccgatacatcgctttgataaaaccggacgcggggatccgtgagaaaagggcgtatttccgccaatgtcgcttcatttgagttgtcatccataatgaaaagctcaaagtctgtaaacgtctgagacagaatacttttaattgagcgggccacatagtcacttttgttatagctcgtcatgatcactgacactttaggcaactcgtcacccccttttcgtacctgaaactaccgctatcatatgttccttatgtcaaagatgcgctaggaatacagactattatgtgaaaagtcagctttgcgcgcacaaaaaaggccggctctgatggccggtctcaggcagcgtgttttcttttttcgcataaatctttctaaaggctcatatggtggaatagataaaaacagcagccgctctgacggctgtctgattacttgtcaggaggttccagcatcacgaggttttcatcaaaggaggaacaatatgaaaccgaaaaagaatcaatatcagcaaatgcaggggatggggatgggaatggatatgcagggattccagccgcagctcgggcctaatccttatccgcagcctcagggccaaggatcacagatgatgccgatgcagcagcagatgtcgatgccgatgcagcaaggccagcagagcttcggcggggggttccccggccagacgcagccgcagcagcagggcggcagcagctttcagatcccgtcaggtccatcatcgtcacaaaacgttcccggcatgctgccgattgaagagtcatacattgaaaatattctgcggttgaatcggggcaaaacggcgacgatttatatgacgtttgaaaacagcaaagaatggaattcaaagattttccgcggcgtgattcaggctgcggggcgtgatcatatcatcatcagcgacccgaaaacgggtacccgttatctgcttctgaccatttaccttgattacatcacgtttgatgaggaaattgcttatacttatccgtactccatgtcttcttattctccgagataaatcaaaaagccaatcgctcacttggcagaggattggctttttttctttataaatatttgacggccgcgacgacaatcataatccacgaaataataaacgccacgccgccgagcggtgtaatcgctccgagaatggaaatctgcgtcacgctcaatacgtacaagcttccagaaaacagaacgatgcccgcaaacatcagccagcccgcgacagaaacgctccccacgccagagagcttttcggctaaaaacgcgacagccagaaggccgagcgcgtgatacatatgatattgcacgcctgtgtgccatacctgcaaatatttatcagggattttcccttcaagcccgtgcgccccgaaagcacccagcgccacagccaataaggcgttaatcgcacccagaataataaacactttcatctattcttctcccgccttttcgttaaagtttccaattcaatcataacccaacatcgggaaaattcaacgcccgtcctccgatgacacgagattgtcggattttttctttttgataagatagatccggtcgaccgctatcgccagcagcgttccgagcacaagaccgttgcttaagagcgaaatcagaatcggatgcatgcctgataatgcgctctcaggcacaaacatcacaccgactcccgtcagaagcgccagaccgataatggagcggattcgtttttgctccgctttctcataagagtcaaactccgtaaaggcaagacccgccattgtggagaaaacgacgaaattcaccgcaaagccgaccggtgagggcagactcgcaaacgcattcataaataatgggatcatactgatgatagcgacaaatacactgcccaaaagaaacggctttttcgaaggaagcttcgtcgtctcaataaaaccggccgcccctgagatcggcacaggcgcaatgcctcccgtcaatccgctcaaaaggtggctgatcgaggccgcaaacccggccgggcgctcacgccgcttccctgcggtgccgccgaattttttcaccgccgcttcaacaacccgaatgctcgcaagcatgttgacaatcaaaagcactgtaatgaagagtgatgtaatgatcagtccgctgtcaaacacaggttttccaaacggaaagagagtcggcagctgaatgatgcggtccggtatttgaatcggtttggcagcgccgaagaccgcaaacaatatccatccgcccgcaagcgaaagaagaatcgcatactgccttaaaaacgtaacatgtgatcgggacatgatgaacattgcggccgtcacaaccatggcaagcccaaagacaaggccgtcgacgctgttttttaaatagccgatgcccaaaagaccttttactatcggctgactcagctgcatgaccaaaagcagcagatacacgccagtcacaaccggcgtaaacagtacggccagccgttcaatcactttaaaaaggctgaacaaaaagaaaaagacagcgcttaataacagcgccccctgaagcgcccgcagcgtctcgccgaatgtcgcgaacaccgtgcccgtcagtccgccgtaaatcgtatacacgccccaccataagcctgccgggctttcattaatcggcagacgatgtccctgaagacattggatgaccgcggcgacgccgagcacaaaaaatgtactctgaatcaatgcggcagaatcggcatggttcaagtgaaatgattgtgcgatggcgacaggaaccacaatcgcagccgcgatcataaatgccgtccattgcaaacccccgagtatcagtttcaagtcaatcaacctctcctgttaaaaatcgaaaatggaatccccgtttccgtcttccccgcgttcgtctttcgtttttttctgatattgattcagcccggcgctgcccatcattttttcaagcagaagcgggtctgtcgaaggagacgcggaaggcttcggcgcctctttcggaatcggattctgcacaggcgccacagcggtgtgcgtctgggtgccgagcacgacgtcacacagagagcggacggcggccacgtgcattttgatctcctcggcgcgggacgccgtttttgcctgcctcagttcttcttccatcttctgaatcaaagcagagatatgtatgttcatgagtaaatcctccagcagtaatttgtcttcttcctgcattttatcaaatttctgaccgaatcgcagaaatgagtttgttattttttctgacagcatacggccccgggcgtcaaaaaaggcgtttccgccgggcggaaacgcctcaaaaaaccggttattgcggcagatcggggatgcaccagtcaatcggctgctcccccattttttcaagggcggcgtttgtacgggaaaacggtctgctcccgaaaaagccgttccttgccgaaaacgggctcgggtgagtcgattcaataataacgtgtttcgatgtgtcaatacgctcttttttcatctgtgcgtgacgtccccacaggataaagacaatcggcttttctctttcattcaccacatcaatgatgcggtcagtgagccgctcccatcccttgcctttgtgggaattagcctggccgcggcgaaccgtaagcactgtgtttaacagcagcactccctgcttcgcccagctgacgagtgatccgtgattcggtacggagcagccgatatcatcctgaagctctatgaaaatatttttcaatgacggcggctgtctgacgccgggctgaacggaaaaactgagcccgtgcgcctgtccgggaccgtgatacggatcttgtccgagaatgaccgcttttacatcctcataggacgtataatgcaaggcattaaaaatatcatggctgtcaggataaatcgtttggctgctgtattcctgtttcagcatctctctcagctcttgataatacggtttgtcgaattcatctttcagctgattccaccagctgtcttttaaaagctgtttcaaactgtccgtcccccttatgaactgtgcagtctcgaatagacgggctttccgtcccacacaatgtcagtcggcgcctcccgcctcttcatatccggctcttcaagaagaaccgcgaagtttttcgtcgggagctccccaagcccgtgcttttcgcttaaccggtctaagtactgcttccgtttggcgccgagatccgcggactgattgccgcctccctcaaaaaacgcatagatgacgctcgcgcaaggaacacgcttcacacggtgctgtttcgcagcgcgtaaataaaaatcccagtcccaataattatggacatccggatcaaaatatcctaacgtgtcatgcagagaacgtctgtacatgctgcctgacggaacatacgtggaaaacacccgcatatcctcataatcggccgtataggcgaatggcttccgtgataccggatatctcgtgttgtcccgttcttcaaatgacacaatttccgcgtcagcatgaacaaagtcggcatcagcgagctcagccgccattctttccaaatggcccggcgtaatgaaatcatcatcatcgcacagcatgatacaatcacctgacgcttgtttcacaccggcgtttcgagcttccacatgaccggcattctgttctaaatcaataatctgaatcggcagatcgctgtacagctgcttcgcttgctcgaccgattcccccgcatcatttacgatgatcacttcataaggctttacggtctgcctggaaattgactccagcagctcacacaaagccggaatccgattatacgtgactatgacaattgatatattcatgatccgctccttctgctttttctcatgttctattaaaacataaagcggctgagagatcaggggggattttttatttcacccggtcagacacatatccaggtcatgcccgccagcaaaaccagaatgatcagaaggtctccccaaaccatgcataccgccttgatatcaaatctgcccgcatccatgacattccaaagttttgactgataaacaggcaccaacaccagcgcataacacgtgcacaaacagatcaaggccggcggaacaagcactgtcaaatcattcctctaagccttccgtattgtgatcaggagaaaatctaactataatgagatataaaacactgatggaggccattgatatgtcaatgcacaaagcacttactatagccggttctgattccagcggcggcgcgggaattcaggccgatttaaaaacatttcaagaaaaaaacgtatacggaatgacggctttgaccgttatcgtagcgatggacccggaaaacagctgggatcatcaagtgtttccgatcgatgccgatacgattcgcgcacagcttgcgacgatcgttgacgggatcggcgtagacgccatgaaaacgggaatgctccctaccgtggagatcattgagcttgcggcgaaaacgattaaagaaaaacaactgaaaaatgtcgtgatcgacccggtcatggtctgcaaaggagcgaacgaagtgctgtatccggagcatgccgaagcgctgcgcacccaattggccccgctggcaaccgtcatcaccccaaacctgtttgaagcaagccagctgagcggtatggatgaattaaaaacggtggaagacatgatagaagcggccaagaaaattcacgaactcggcgcgaaatatgtattaattacaggcggaggcaaactcaaacacgaaaaagcggttgacgtgctgtatgacgggaaaaccgcggaagtattagaaagcgaaatgattgatacgccttacacacacggagccggatgcacattctccgcagccgttactgcggaactggccaaaggcgctgaagtgaaagaagccatctatgcggcaaaagaatttatcaccgccgcgatcaaagaatcctttccgctgaaccaatacatcggaccgactaaacattcggcgatgcgtcttagcggaaaataaaataaatatccccctcatcgcctgagggggattatttcatttttttcgcggatgaccgtaaaaacatttcaatcgattgcacaaagagcgcatattccttcatctgttcatatgtatggctaagccgatcactccattcgttgtgcggctcggctctcttgagcatgcgtttcagctgaagcaatacttctttatattcttcccgcttatcttccacttgctctgcggctttgacaagtaaacatttcggcgtcatcttctgattcttcaaaactgagaaaacaactccttttattcctgagaatagtagtcttttgtttgaagaatagcacagatggcataggtttcacataagaaaaaaggacgattttctacaaaagtgtccaaattgaggcatttatttccgtgctccctgtcgatgtaaccgttacctcatcatttcccgggaaaggaaaatatctggcgctgaatacctcttctccatcattcaaaaacaattcgatggaggatgcatccagaaatagctgcacggaatgcacctcacttatggcgcagcttctcgtttctttttcctctccgctaaaagcggtgcgctccagcacggcgagtcccttttcctgatgaaatataaaccgggccgcgccccgaatagagatttcaaaaccagatttataagtgatgtcatccagcagcacttcagcccgggacgcatctttcaccggaagggctgcagacgagcattccaattggagacggcgcttttgttcatccgtacggcgcgatttcatttccgggagcggacgctgtatgattctgccgtttgacagtgacagctgtctcggcatcgtcaaacagtgaacccaatgatacgcatgtgtcggatgtttgtcctcctcctgatcagggacgcccatccacgcgaacagaatcctccgccccttatcatcttccagcgtctgagccgcgtaaaaatcaaaccctctgtcaagctccgtgaattcaccatgcttaaactcaagcggctctatatccagcctgccgaggaaatagcccgcctggtggctgttatgatatttcatcccgtcggcgtcaagcccctgcggacatacgagcagcacgtcggttccgtcaagagaaaacaagtccgggcattcccacatatagccgaatgacccgagaccgccggaatctgcccccgcaatcgcaccgacaaatgtccaatccgttacattctctgatgtgaataacacagcgctcccggtgagcttttctgtctgcgccccgagcaccatgtaatacgtcccgtctttcttccaaaccttcggatcacggaaatgagcggtatagcctgccgggagacgcgcgacgactccttttttttcaaatactttcccatcttcggatacggcgaggcattgatacgtttcccgattgccttcttcgtcacggacattgcctgtgtatatcaggcagagccggccgtctttttcgatggcgcttccggaataacagccgtttttgtcataccattcccccggcgcaagcgcgatttcttcctctttccaatcaacaaaatccttcgtcgtcacgtgagcccaaaatttcgcgccatgtcccgtatgaaatggctgccattgaaaaaacaaatgatatacaccgttccattggatcacgccgttcggatcatttaaaagcccgaccggcggcataatatgatagttctgacgatacggatctgatgcagcggtttccccccgcttctttttcgcttcctcagcctgcagccgcagctcttgatcaagtgtactcatttggcggcctccttttctttagctcccataatgtaagcggcaataaacgccgacacagaggcgatgcccattccgatcagatagtttatgagatttcctaaaccgagcggagccgtgatggcaatcatcggaattccggtcagtccgtaggcattggcggcgacaccggtcaccacgacataggcgccccccagcgctccgccgatcattcccgcgataaacggcttgcggtatctgaggttcacaccgaaaataacaggttctgttacgccgagaaaagcggaaaacgcggcaggcagagcgatttctttcattttcgcttttttcgtcaggaaaaatacagccagtcccgccgcgccctgagcgacattcgccatcgaccagataggaaggatatagtttctgcccaaatcagcgatgaggccggcctcaatcgcatgaaagctgtgatgcacaccggtaagcacaataagcgggtaaagccctccgaaaagaagtccggcagcaatgcccgcgtgatcatacacatatgtcagcgagacggtaatgcctgatccgatcgctctgccaagcggaccgattgcgacaaaggtaataaatccggtcacaatcaccgtgacaaacggcgtgaccaataaatcgaatgcgtgaggcacaatttttctcgtgcctttttccaccctgctcataatgtaaacggccaacagtacggggatgaccgtcccttggtagccgagaagcgcaatgttgaagccgaagagttccataaaatcaggcgatgcatccgcaagcccccacggattcaaaagcgccggatggatcataattcccccgagcaccgcaccgagatatgcatttccgccaaattccttcgccgcgctgaatccgatgaatacgggcaggaagataaaagccgcgcttgaaaacatgtcgagaagccgaaacagcgatgattgttcagacacccagtgaaaggccttcatcatgccgagcaatcccattaaaaggccgcttgctacgatagccggaatgatgggaacgaatatgttagacagtgttttcgcaaatcttgctgccgggttcagcttttttttcgctgcgtcctgatgtgtctcacgatcctcccgccccagatcggcttcttttgaaaacgcgtcatacactttattcacgaggccggtaccgaatataatctggtattgtcccgagctgctgaaagccccttttactccttctatttcttcaatgccggcctggctgatcttctgctcatcttgaatgacgagcctgagcctggtcgcgcaatgtgtcgcactgatgatgtttgatttccctccgatatgtttgacaagctcttttgcaatttcttgataatccattatgtatccccctttctaaaatcaaaaaagacctaaaattcgccaacgaaaaaggacaacatgatccctttttcatgtacgcaaattttaggtcttgcctgcataaccagtcacaatcccgccggattcagttttttgatgcgctttcattttatttcatgacagcgctttcgtcaatatgttatcaaaaaaaagtctgtttctccaaacagacgcgttattccgggtttttttgcagacgctggacatgcagcgtaatatagccggcctcggattccggcagttccaaatcatattcattttttaaaaacgccgccagttcaagcgcacaccgataagcaaacggatactttttttggatgaaataaagcatctcctcgtccatggaatggagggcttcatttgagtccaaccggctgaccgcataccgcaagtgcgtgacgaggcgctgatatgaaatactgtcttcatccaccttctgttcaaaaaaggattcgatcttttcgatcatttctttgatcatggttgtatgcttcatcgccgaatacatgcttttggcatccgccttggcagtgtggatatgaagcgcgatataccccgcctcatcatcaggcaatgatataccgagggtctgtttcacatgttcgaccgcccaaaggccgatctcatattcttttttatagagcgccttaatttcatgaagcaatcggttatgcacatgaaggccgttttgaatcctttcgatcgcaaaggataaatggtccgccagcgcaatgtgaatatgatcgctcaaaggtgccgcaagctctccctccgcatggctgatgatatcttcagccgcttctatatgctcttcgggaagcgtttctaacacttgtttgaacttttcattttcgtcgtgcacgacaaatattttttcaattttatgtttttgaatcaaatcattctttctcttttgaaaagcgattccgggacccattacgatcttttcccgtccgtcttcttttattaacgccgcattgttatttaatactttgtctattctcaagaggttcgctcccgttcatatgtttagtgggattgtaccctctttttcatatgatgtaaagataccggaccagcccgctcccgtttcggcaattctttgcggacaggtatccatcgatttttatccagcctgccgcaggccgatttcgtttcatcggtcagatccgccgatcgtacccggctcacaaacgaaaacgcctcagccgtcagcttcgctttcttatgatagacaacttggtttccgtacacggcggctaattgaaatcttccgtcacccggcgccatccagttcatcagaaagaccatccacacccgtaaagatactagcacacgtttcattgcaaatcatccctccgcttctttttgacagacagcttgttcgcaggcctgttttctctccgctttaacggaaaaggcggccgatccttctccgctaaaaactagcgggtctagcaaccctatgactctatgatagacgcggccggacgaattgtttgtcacaatatgagtgaaaaaacaaactagttttaagaagttttgttgaaagctgatggaaatgacctgaaaaatggagaagcggttaaaaaaagttatgcacatcttatcccttggttaagcacagcttaaacacaggacatatccacatatccacaaaacaaatctatattttgtataggaacattcgttcccaacaatatatatacacagatttattcacttatacacatgattctgtgtataacttcctccttattcacagatcaatttccataaatgagtcctatgtcacaaggaatattttgaattttcgagaaatatatactagatttctaattttagataaagaaaaagggggaaacacgattgaaaaaaggaatcatccgttatctgcttccggcttttgtcttatcctttaccttatccacaagttcacaggctgcgccggcttcaaaaccgcaagctcctgatctcgagaaggctgaggtgttcggtgacattgatatgaccaccggcaaacaaacgacggtcatcgtggagctgaaagaaaaatcactggccgaagcaaaggaactcggcaaaacacaaacaaaaaacaagctgaaaagcgaacgcgcaaaagtgaaaaataaagcgctcaaaacgattaaacacggaaagatcaacagggaatatgagcaagtgttttctggtttctccatgaaactcccggcaaatgaaatcccgaaactgctgagtgatcaggatgtcaaagcggtttatccgaatgtcacctatcataccgatcagctgaaagataaagacatcaccctttccaaggatgccgtgtctccgcagatggatgacagcgcgccttatataggggcaaatgacgcgtggaagctcggctatacgggcaaaggcgtcaaagttgccattattgatacaggcgtcgaatacaaacaccctgacttaaagaaaaatttcgggcaatataaaggatacgattttgtggataacgattacgatcctgaagaaacgccggccggtgatccgagaggcgctgcgactgaccatggaacccatgtcgcgggcacggttgctgcaaacggaacgattaaaggcgtcgcgcctgatgcaacgcttctggcctaccgtgtgcttggtccgggcggaagcgggacaacggagaacgtcatcgccggcatcgaacgcgccgtacaggacggagcgaatgtcatgaacctttcgctcggcaattctgtgaataatccggactgggcgacaagcactgcgcttgactgggcaatgtcagaaggcgttacggccgttacgtcaaacggaaacagcgggccgaacaattggaccgtcggctctccgggaacatccagagaagccatctccgtcggagcgacacagctgccgctgaacgaatatgccgtctccttcggttcttattcctcagcgaaagtgatgggctacaacaaagaagatgacataaaagcgctgaataaaaaagaagtagaactcgcagaagcgggtatcggcgagcaaaaagactttgaaggcaaagatctgaaaggaaaaatcgcggttgtcaaacgcggcagcatcgcctttgtggataaagccgacaatgccaaaaaagcgggcgcgatcggtatggttgtgtataacaacgccgcaggagaaattgaagccaacgtaccgggcatgtccgtgccgaccattaagctgtcatcagaagacggcgaaaagctcgtcagccaaataaaagcgggcggcacaaaagcgacattcaatttatccgtggctaaatcgctcactgaacaaatggcagacttctcttcacgcggtccggttatggacacgtggatgataaaacctgacgtctccgctcccggcgtaaacatcgtcagcaccattccgacccatgatccggccaacccgtacggctacggatcgaagcagggaacaagcatggcttcaccgcatgtagccggcgcagctgctgtcatcaagcaggctaaaccgaaatggagcccggagcaaataaaagccgcactcatgaacacggcggaaaccttaacggatgcggacggtgacgtatacccgcataatgcgcagggcgccggaagcatcagaatcatgaaggcgatcaaagcagattctctcgtcgccccgggaagttattcttacggaacgtttatgaaagacaaaggcaatgaaacgaaaaaagaaacatttacgattgaaaaccaatcgtccatcagaaagtcatatcagctggaatactctttcaacggcacaggcattaccgtttcaggcacagaccgggtcgtgattcccgctcatcaaacaggaaaagtcaatgcgaaggtaaaggtcaatgccaaaaaagtaaaagcaggcacatttgagggaacagtcacagtgcgtgaaggcggaaaaacagtcgcaaaagtgccgacgcttctgattgtaaaagaaccggactatccgcgcgtgacttcgatcgacgtacaggacggcacagcgcaaggttcctatcaaattgaaacctatctgccggcgggcgccgaagagctagccttccttgtgtataacagcaatcttgactttgtcggccaagccggcatttataaaaaacaagataaaggctatcaatatttcgactggaacggcaaagtcaatggtgacaccgcactgccggcaggagaatattatatgctggcctatgccgcgaacaaagggaaatcaagccaggtgctgactgaaaaaccatttatcattgaataaccaaacaaccctgctggagcatcagcagggtttctttctgatcattcggcaaaggcttcgcgaagcagccggtatgactgaagtttatcttcaaaatgatgagtaatggtcacagccatcacttcctccgtaccgtatgctttactgagagccagaatctgttctttcacttgctgctttgttccgatgatcattcgattccgattatcggcaattcgcctttgttcatatggtgtatacgtattgccgcggacggtttcgtaagacggtacgccatgaagcggaatcccctgttcccccgcaagcagcgtataatccatgacggcagcgagttcctccgctttctcctcagtgtccgcgcacagcacaaacaccgccacggccgtttttggttcttttcctaatacagaaggtttaaatcggcgcttatattgtgccgtcgcgctttctccgccttctccattaataaaatgggcaaacatatagcctgctcccgtttctgcgctcagaagcgcgctttcccccgatgaaccgagcagccagacttccggcgccgtcttaataagcggggatgccgtcagattcggaaaacggtgattgtcatcggcttcatcatgcaaatacatcgccagctcacgaatctgctgcgggtattgatcagcattgcgcttcccgccgtcattcagcgcccatgatgcaatcggcattccgcccggcgccctccccaatccgagatcgattctgcccggcgtcaacccttcaagcatgcggaagttctccgctactttataagcgctgtaatgcggaagcatgacaccgcctgagcctacacgaatgtcgttcgttttcgccgcaatatggctgatcagcacttcagggcttgaacccgccagccgctctgaaaaatgatgctctgacacccaaaacctcttatatccgagcttctctgcctcctgcgcgagcctcaccgtatcccgcagcgcgctttccgcagaactcccttctgatacaggagattgatctaatatacttaatgaaatcatcactgtcacctcctcaacatcgtaccactgctaagccgatcatatgaagtctggcgactttcttcgtcatcttggtttgttattacgatgatttagcttcctcgcgacctcacaaatgccaaacgggctgcctttatctttaacctcaaggaatactgcaataccacctgattgcttcttttgtttccatcgcaagcgatatcggcacgctggctgtgtgtccgtagacgagcggctcggaactacagccatgttaatatttacaaagagggagatgttaagaaatgatcttaacctgacatcttgttgtcaagttttaacggatatactaaaaacccagaggtgagcggatgcaaatcagcagattatttcaagtgatttatattttattggaaaatggaaccgttacggcacccgagctggctgagcggtttgaggtgtctgtcagaacgatctatagggatgttgaggctttaagccaggctggaattccgatttataccatacaagggaaagggggcggcatttccctttccgacaggtttgttctgaacaaatctatgcttaccgacaaggagcaggatgagatcctttttgctctccaaagcttagccgccgcccaataccctgattctaatgcgatttttgagaaattgagcagccttttcaggaaaaacaacatcaactggattgaagtggatttttcctcatggggaagcgggcaaaaacaaaaagagctgtttgtacttctgaaacaggcaatcttggagcagaaagtgatttcatttacctacttgagtgctgccggagaacaaaaaagccggagagccgcgccaatgaaactgctctttaaagatagagcgtggtacattgaagccttcagtttcgaaaaaaacgctttaagaacctttaagattaacagaatgtcgaatgtccgacttttaaacggagaggagatgggacttcaccttcagcatggctggtcggagccttccgtgacttcttctgcagaagaatcggttaaaaaaccgcagagaatccctctggtattaaaaatagaccaagcgggagcctatcgaatcgtggatgagtttaaagaagaggacattttaaaactggaagacgggtctttccgggtcacttcagagattcctcccggtgaatggctttatcactatctgctttcctttggagatttactggaagtcattgagccggcgtctgtcagacttgaaatgaaaaaccgcactgccagaatggccgaaaaatatttgaggtaactggacacgatgctgtcaggttctgttgattaaactagccttgtactcaacatttgaaggaggattcagcagaacgatggaaaacagtccgtacttattaaatatgagcaaagaatttgcaggtaaacgggtcctagtgaccggcggaacacggggaatcggcagagccatcgtcaaacggctgcatgcggcaggagctgaagttatagctacggcaagatcattacccgaggcattgcctgaaggcgcagggtttattcaagccgatgtctgccttccagaaggcgcagatcatatcattaaggaaacaattcatacattcggcggtctggatattttgattaataatgtgggaggttactcaagtagcacggcaggggctttagctttaacagacgaggattggcagacagcgtttaacgcaaacctgttttcttccgtccgcctcgatcgcggatttctgccttacatggtcaagcagcaaagcggagtgattgtccatatatcatctattcaacgaaagctgccgggcaacatgaccatgccttattcggctgccaaagctgcactagttaactacagtaaaaacctggcgacccaattcggccctgaggggataagaatcaacgcactagcaccggggtttaccgaaacagaagcagctgaacagttaattgagagaatggctaaacaagccggaaccgactatctagccgcccgtgagcagttaatggacgagcttggcggcattcccctcggccgtccggctcaacctgaggaggttgccgagcttgccgcattccttgcgtcaagcagagcctcttatgtaacgggttgtgaatatgttattgacggcggaaccatccgcaccgtttaacgaaatgacaaaggagttgatcttatggagcctaatgcgcttccgcaagttatacaagagtttatagccgcttccaataaacccgatccggatgcctatatcgactgtttttcggaggatgctttgatctttgatgagggcaaagtgtgggcaggcaaatccgctataagaaaatggagtgccgaacatcattttgatgcaaacgtaacgcttgacttacaaaggcatagacaggatcagggggaaatcacggcggtttttaaggttgacggcgattttgacaaaaccagcctgccgaaccctctctatttagatttttattttcagattcataatcacaagattaagcagctggcgatccagctttctacaggacctgaacaaacagaaacggtaacccagataagaaaccaggaggaacataaaaatgatagtaaataacgtgctgctgaagctgaaggacatgagcccagagcatatcaagcaagttcaaaccgttctgctgggcatgaagggaaaaatagacgttcttctcgatgttcaggctgaagctaacattcgccctgccccttcaggatatgatttgattctgatcactaagtttgcatccttgggggatatggaaaagtaccttacacacccggttcatcaggacatcgccaagtttattggcacggttctggaaacgcaggcgtccgtttgctatgaattataataagacgatgaggaatgactgccagttaagtcaattaacttcacttatatacagaaatcagccatatacacgttattcactgttttagaacttcggtaaggcaaacagagctgctctgttgtgtattgaatgcagtctcgattattaatgaaaaaaagacgatatgtgaaagttcaaaacccggaacagcagctcatcaaattttagaactgtacatcatcgcagatgttccattttgtcgaaatatgttacacgtgaaacataaaaaaacctctcccgtcaggagaggttttatttcttaatttttttgaaaacctttatctttaacatattgatttaaataggttctcggtttttgtttcatgaactgcagaatttgatcagaccacgtttcaacccgcttgccgtttgtccgtttatcataataagcggagatggtttcatcatattccttcatataactgcggaagttttcttcattcgtatcgtacgtgttttcatgatatacggcttgtttcggcagacgcggcttttggccggacggatgcgcgggatggccgactaccagaccgaacagcggcagcacatggtcaggcgtaccgagcacttccgtcacctgatcaagttcattccgaatgcctccgatataacaaatgccaaggcccattgattctgcggcaacacttacgttttgtgcggcaagtgcggcatcaatgacgctgaccataaacatttccgtattctcaagaagctctgtaatgttttcgcctttttcttccgcaagttttttatggcggtacaaatcagcacaaaacacaaacaagtgcccgttattctcgacgtaaggctgatttccggccagcgccgccagctttctttttttctccggatcggttaccccgatgatggagtacgcctgcacgtaactggacgttgacgccgcctgggcgcttttcactaatgtatctatctcttccgctgtcagaagctcgtcagtaaatgatcggatcgaccgatgattaagtatggtttcaatggtattgttcatataaaagcctccttctctatatatcatatccgaaagagaatcatgccaaaagcgaaatgctctaaccaaaaaaagacagcccgaaaaacgagccgtctgacattaagaattaaacaaatagcttttatatttcgtcagctgcacacttgcgttgtatacgatcccgaagctgattaatgtagacagcaccgagctccctccatagctgacaaacagcagcggaattccggtaaccggcataatgccgatattcatcccgatgttctggaaggtgtgaatcacgataagtgcagtaaatcctacgcaaaaaaacgcgccgaatcggttaaaggcatgcaagcggtcaatcagcaccacaagcctgtaaattaaaaagaaaaacataacaacggcaatcgcgcagcctaaaaacccaaaactttcacccaaaatcgcaaagataaagtcggtctgcccctcaggtacgtacaccttcagattatgaacgccgtttccggtaatgccgcctgatccgatcgccataacggcctgatccacctgccagcttttatcactctctgcctgagtcgttgccgcactggagtcagacatccacgatgtaatccggttgatttgataatccgcaatgccgattgaattcgccacatggggaaattcaatcacgagcactaagaaaagcccgataacaagggcggccgaaccgccgataatggtgatcagcttccagtttacacctgacataaacaccatcaccatcacgataaacagacagatcgcacccgttccggcatcctgcaaaacgatcagtccgatcggaataaccgtccatgccgcaattttcaagagcagattcacatcttcccgaagtgatctttgatctttcggtcccgccttcgatataatggacgcgaccatcatcataattcctattttcgtaaactcagagggttgaagggtaaaggttccgatttgaaaccagcttttcgccccgtttttaatcggcgcgatagattccggcgcaacacgcaaaaggagcagcgacagcacgccggcaattaatacgtacagactcagtttctcaagctgctctaaatcaaagtacagcaataatccgatgaatcccgcccctataacatagaagacaatctgtttcatccaggcgctgcctccatactgcccgaactgtccggccgcataaatcgcagcgacactaattattaaaaacacaccaaatataaaaatcaaatccccctgataatagggattttgctgtttcttatatcgactcattctatcccgccttacattttcatcggaagtcactattgtttattatacatgaacaccgttcaagaaaacatgatgaggttgtttcctttttattttttacggtttggagactacacgacatatgacgtgtcagaaaaggaaatgtttcggtcatgatgaaacttttccgataaaaaaccccttctcaccagaaaaggggcagcgggaatatagaaaccaatgaattcaaatgactttacctcatgtttaatgtcataaacaagctgttcgggtcctcattgtagtccccaaacggttcacaatattgaaacccggctttttcatacagcagtctggcgggaaggaaagcctccacagaaccggtttctaggctgagacgctgatagccccgccgctttgcttcttcaattatatggtgaagaattcgtttggccacgccttttctgacatgctgcggggaggttttcattgatttcagctcaccgtgccggctgttaagctcctttaaggcaccgcagccgagcaggacgccgtcttccctcgcactccaaagcgtaacgtcaggctgacgcaggcggtccgtattgagcgcgtgtatactttccgggggagagcagagggtcatgctcttcagatgatcctgcaaaagcgcaataacatccggcgctgtaacatcgtctttatttatgttcatttcaaaacctaccttagtgtgcatgttttctttaaacataacaaaggttcacaaggctgcgccatcgcactgtctgaaaatgtgacagggtatttgacctttctgatttctattacctatccaaaaatggggcaatagttgcaatacatttctcgaaaaagcggtatcaaaaattggaaaacatggtataataattgtaacaaaatgttcaaaaaacgaccacaaaacagacacattttattctctgtatttcattttggaaacgctcccataaaatgaaaggagacacgtaagatggacatgttttttgcttatttactggtcgcaagcgcaacacccctctttatctggcttgataacaaaaaagtggctctttcggccataccgccaatcattttaatgtgggttttcttctacttttacgcaaccagcagcctatcccccctcggccacacactcatgattatcctgtttgccgtcaacgtcatcgttgcccatatcgccgcctttatcatttacggccttccgcgcctgcgccggagaagaagccaataaaggcacaaaaaaccctcttcgcctaaacgaagagggtttctttttattcgtgatgttcggaatgctgcttcgcaccgcccggagggtttccatccatatggtcaccgtgatggtagtgcgccgcaaagatccagatagaaccaaggatgataacaatcgctccgaaaaatccgaagagcgtgtttccgacttggattccgccgttttcgctttctgtcatgtgcatgaacatgagaagctgcaggccggcctgaataaatgcgaatccgaaaatgatccagagttttgctgatgagcttaaatctgtatataccgcaacccaaagggccagcagggtcagaataatagacaacgcaaaacctacgatatgcttccacggaaagtggctgtgttcagcagatttgtttgccatattatagtccccccaatccgatgagatagacgcctgtaaagatgaagatccagacaacgtctaagaagtgccagtataaacttgagataaagatttttgaagacgtctgcggcgttaatccgcgtttcttcaattgcagcaagatgccggtaatccagaagataccgatcgttacgtgcgttccgtgcgttcccagaaggacgaagaatccagaccagaaagcacttgtaccgagagatgctccttcatgtacatagtgaatgaactcgttaagctcacatcctacgaagcctgcgccgagaagaagcgtaatgatcgtccatatgacgacgccttttaaacttccgcgacgcatttcatgaacagcgatcccgcaggtaaaactgctgatcagaagcaggaatgtcatgatcatgacaagcttcacttcaaataattcagccggtaagactcctcctgctgttcttctttgaagaacgaagaaggttgcaaatagtgttgagaacaacacaatctctgcccctaaaaagatccaaaacccgagaatattgagtctgccggtttcagattgatattccataggcgcgttagaattgccgtgttctgcatgttccataaatcacgcctcctttattcggaaatctttctttccgtctcttttatttcttcaacaggtatatagtatccattgtcatattcaaatgaacgaagcaccatgcaaagcagaatgccgatcaagccgacaatgcccatccagaaccattcaaagacaagtccgaagcctgcaataccgaacgccactgacataataagcggtctgccggagttgtgcggcatatggattttcttgaacttgctttccggatgaatatccactttgtcttctttcaattgcaggtacgcatcttgagatttcacttcaggaagcaccgcaaagttgtagtgcggcggaatcgcagatgaagtcgcccactcaagcgtacgtcccacgccccatgaatctccgctgatctcgcgagtagagtagcggaagctgtagtagatgttgtagcaaaggattaagaatccgacacccatcatgaaggctccgacagttgaaataaagttcaatgtagtccatccgtcattcggtccgtatgtgtaaatacggcgaggcataccttgcagccccaagaagtattgagggaagaaacatacattaaatccgatcataaagatccagaagaaccattttccgattctctcgttcagcttgtggccgaacattttcggataccagaaaataaatcctgcgaaacatgcaaataccgtacccgcgatcagcacatagtggaagtgagatacgaggaagtacgtattatggtattgataatccgctgcagccatcgcgagcataacccctgttaccccgccgataacgaagttcgggatgaacgcaagcgcccacagcatcggtgttgtaaagctgattcggcctttatacattgtaaagagccagttaaagattttaaccccggtcggaaccgaaatcgccatcgttgtgatcgagaagaaagagttaacagacgcactgttccccattgtgaagaagtggtgagtccatacaaggaaactcaggacggaaatggcgataatagagccgaccatcgctttgtaaccgaataactgctttcttgcaaacgctgaaataatttcagagaaaataccgaaagccggtaagataacgatataaacttcagggtgtccccaaatccagaataagttagcccaaagcatcggcataccgccggcttccagcgtgaaaaagtgagcgccgaacaaacggtcaaatgatagcagcgccaatgccactgtcagaacagggaaggcgaatacgataataaccattgtaatcagcgtcgtccatgtgaacatcggcatacgcatcagcgtcatgccttttgtacgcattttcaggatcgtcaccataaagttgatacccgtcatcagcgtaccgataccggcaatctgaagaccgagcaagtagaagttctcaccaggcccagggctcatgtcgttacttgccagcggcatgtaactcgtccagcctgcgttcggagaacctccgataacgaaagaaatattgaaaagcatcgcacctacgaagaacgtccagaaactcaggttgttcaagtacgggaatgctacgtcgcgcgcaccgatctgcaaaggtacgacaacgttgatcagaccgattaaaaacggcatcgccatgaagataatcatgatcgtaccgtgagtcgtaaagatctcattatagtggtttgagtctaaaaaattgttattaggaagcgctaactgggcacgcatcatcaagccgtcgaccccgccgcggaacagcatgataacagcagagataatgtacatgattccaagtttcttatggtctacagacgtcagccattcagaccagagccacttccactttttgaagtatgtgagtactacgatgatagcaatagtggaaagcgcaatggaaacttgtgcgcccagaattaatgggtcacctgttacaaaaaattcatcccatctcaatttcattcgggcttcctcctttcttgttcaatttcaatcttgtttatcgtcggatactttaaattcgtttttcttaacatcttcccacggatctgttttagagtgcggtgatacggctttgtagccaaggcgtttgcgcgcctccatcgcatattcggcatcttggccgtggtcaacgtattttaagtgtgtagaagagaacgttaatttaccgacattctccggaagcatcagttcgtcatacttctctttcgtcagctttggagaatcgctttgggcttttttcacccagttgttaaagtctttttgcgtaactgcttttacgttgaatttctggtcggcaaagtgttcgccggtgaagttcgcgttgcggccttcatatgttcccactttgtcagcctgtaagtattgatccatcagcattcctgccatcgcgtatttttgtcccccgagctgaggaatccatagcgacgccattgaatcggctgaagaaattttaaataaaaccggacggtctacaggaatgttcaggtagttaaccgtctcaatatcctgctctgggtaactgaatacccatttccagtctaccgaagtagcataaacgacaagaggttctttatccttagtcgcttcaggcgctttttctaacgaatatatcgtctgtacggtaggcacagaaagtgcaatgacaattaaaattgggatcactgtccagactacttctaagaacgtgttgccgtgcatgtctggcttgtaatttccgctgtctttgcctttgcggtcgcggtatttcactaaaatgattgtaaatagtacgaatacgacgccgacaatgaacagcataaatccgattgacaagagaatcagatctttttgctggtctgcaacaggtcctttcggatctaacacggaaatgtcgctgcatccgcccagtacgaaaacaacagccaacatcgctaataaaagtaacggtttaaatgctctgaacaagaagatcaccatccttcctattgatgtagtgaatctgaaatgtactttctcaaaatcttttctctatctaccttgttatgctatcaaaatctgcccttattagctttatttttttctaaagttcatctttttttcgccctgatgtcacaaaatcgacaaaaaatgcatgaactttttccacttgcataaatcaaagttaaaaagttttagatcatttagcatatatagagaaaaaagatagtgagaacgaataataccaaataaaggtttaccataataaaatacgctggtcaacaaaaagtttcattttgttaaccattccacaaagaaaatattttttcctttgctcacaccttttcacacgttttccattttaacgcaacgcatggtgaaaaaaaagagatgaacgcgcgttgatatgttcattataaaaaacacattcatatgtttaatatggacaaaacgaaggaaacatataggcataaataataaaaaataggaagtgatatttatgggttttatcgtatctctgattgtagctattattatcggctggatcggaagtttatttgtaaaaggaagtatgcccgggggaattatcgggtcaatgatcgccggtctgatcggcgcatggatcgggcacggcctgctcggcacatggggtccgcaccttgccggctttgccatcattccggcaatcatcggagcggcgatcgtggtatttctgttcagcctcatcgccagaagcagaggataaaaaaagcctcgtcccttatgggatgaggcttttttccggtagagcgtccaaatggctgataaaacgccggaaagccgctctgccttcttctgtctgtttaaagacgccggcatgctccagtatccgggcaaaaacatgtccgatttcttcttttagaatctgttccgcgttttctttcgttaccttccgcttgtgcagcacgctgagcgcccactccttatgcttggccgcagaaggatcggccgttaaagccgcctccgggtccggtgaacacagcgcttcagccgtgcggatcatctcttcttcaagacgccccggcagaatcgcaagccccatcacctcaatcagtccgatattttcttttttcagatgatgaacttcctgatgaggatgaaaaattcccaccggatgctcatctgaggtgcggttatttctgaggacgagatctaattcgaataaaccgtttctccgccgggcaatcggtgtaattgtattgtgcggtgtctcccctgaataggcgaggatatccgccgcctcatcggaatagccgcgccatgcccgtaagatggagtccgccgcgtcagaaagctcagacgcgctctcgctttgcagacggatgaccgacatcggccacttcacgacacccaaagccgtattcggataatcaggcagcctgtaacggctttctgtctccgcctgcgccatcgggaactcgtgatcgccaccttgaaaatgatcgtggcttaaaatactgccgccgacaatcggcagatcagcattggaaccgagaaaataatgaggatactggctgacgaacgacagcagcctgtcaaacgtttttttgctgatcttcatcggttcgtgccggtctttcaaaacgatgcaatgctcccggtaatacacatacggagaaaattgcagaaaccactgctcatcaccgagaatcaccgggatgacgcgaagattttgacgcgcgggatgatccggccttccttcatatccgacattttctttacagagaacacatctcgggtaatcggattgcggctgctctttggcagcggcaattgctttcggatctttttccggttttgaaaggttgatcgtgatgtccagctttccgtaagccgtctcagccgtccacccgatattccgctgaattctgtccgaacggatataatacacatcctctgaaaatcggtaaaacgcctttgtcgcctgctccggaccgtgcactgcctttgtttcttcaaaacgccggacaatctctgacggctgcggggcaaaacagcccatgatcttcgcgcttagcagatcgcgatatgtgtctgtatcggctgcaatccggcccgtctctgcggcccattcataaatcggggctaatatgtccggcagaggcgccgccgagtcaatttctatctgttctgaaggctccggatgggttatgtgcagcgtttcatataaacggtttcttgtatattcaatatcaagaaatgaaatcagctctttttgcagtccgtaccggattaaacgttccacgtgccgctcaatcgccattgtcatccccctttagttctctcgctccggccccgatatccgccgtataaaagtcagcctttctcccggtctgttcctcataatgggcccctgccgtttcaataaaatctgaaacggcctcgtccttgacgatactgaccgtacagccgccgaaaccggctcccgtcatccttgacccgacaaccccggcatggcgccatgccgcttctgccagtgtatccagctcaagacttgtcacctcgtagtcatcgcgtaaagaaagatgcgaatccctcattaattcgccgatgtgatgaagctgattgctgctgaacatcgcggccgccttttgggtgcggtggttttcatagacggcgtgttttgcccggcgcctgttcacttcattctgaatcagctccgcatgagcgtcaaaagcggaaggcgacagctccccgagtgactgaatggaaaggtgcttctgcagatcaaaaagcgcttcccggcactccttgagcctcgtattatagcttgagtctgcaagcgttcgttttttattggtattcgcaataacgatcgacagtccagacatcccgagtttcgtatattcaaaggcgagcgtcccgcaattcagcaggatcgcgtgatctttctttcccatcccgatggcgaattgatccataatgccgcagctgacgccgataaaggaattttccgccgcctgagcgagtttcaccaagtcgatcatatccgcatcaagcccatggcattccttgagaatgaccgccgtgacaagttcaatggaagctgatgatgacagccctgcgccattcgggatatttcctaagaatacaatatcgaagccgtgcggaagagaaaaaccgctgccgagatattccgccatgacgcctttcggataattggcccacccgtcctctttttggtagcggatctcatcgagactgcattcctttatgcctgcttccttaaaattatcagagtacattctgacgagcctgtcccctctctcccggacggctgcatatgtaccgatcgtaagcgcgcacggaaagacgtggcctccgttataatccgtatgctctccgatgagattcactctgccgggcgcaaagaaaatacgcaggtcctccgattccccgaatacatcagcaaacgctttctttattttgtgtttcatacgtatcccctttcccgttactctttcccccaaggctcggaaagaaaccgttatgacacgccctcttctttcgcttttctgaagacaatccacttgctggccgcatagttgacgactacgataatgacgttgtcggcgattttcgccaaagtttcgttcatatgaaattgactgaccagaagaatcatcatggcgagatctatgccgagagacaatacccgcacgctgaaaaaggctgtcagttctttcatcagactccgcatccccgcggttttttgctgaaatacatacagtttattcgtgacataagcaaatagaacggacagaatccacgcagcgacggtcgccatcttgtaatccatctgaaacaccgacgtcagaatgtaaaaactgacgatgttcacgatcgtcgtgaaaacacccataatgatatacatcataatttctctgtagcgcatggcaattcctcgctttctgaaaaacttttctaaaacttttgtcaaataaagacgaacttaccctgattttctgttactgaaaaaaacagagagcgcgtcaaaaaggctgcggaaggtgacggagcgccccagcacgtttgattgcttaatcatgccgtcaatgagcgcgcacatcattctggcggtgtattccgtatcaatttgttcttctattaaatttctcgatttgagccaatttatgtacaagcagctttcttcaatccatagctcgtaaagacggatgtaggcttcatattcctgtaccaccttgtaattgggcatgtgaagggcaaaggacacgatgttccatgccggtttgctgttaataagatgcatcagcaagtcagccgcgcttcttgccgcttcataaagtgtcagcggcctggctgattgccgttctatttcgtcgagatagccggtaatgatcctttttttgatctgatgcctgtctaacaaatgcttcaggaaatcttctttgctttcaaaatgaacgtaaaacgcgcctttgctgtaacccgcggctttgctgatttcatctatcgatactgtatcgtaagctcggtcaattaacaaatgaaggcctgcgtcaataaaactttcaaatgtttcttctctcttaatttgaaatttgttttttttcattttttaccccagctgtttgatcttcactttatcttacaccgaatcattcttttgcggtattttttatgtaaaaagaatatgttagttcgacgttcaaagggtaaatgttaataggtcagatggtttattttcatttacatactatccagtcagtatttaattgtttattattatatgtaagatttcttgaaggattttgggtatttcagtcattttcttagggaataggtaggtgaattcatcttcaatttgggattaccggccaactatgtgtgatatttgttatacattggctgctgtagctgggcaaatcaatttttcaattggaggttcttatgaaaactcatgtaatgaaagagatagatcaagattggcatttgttaattcaagaggctagaatcatgggtttgcacattgacgatgtaaggcgattcttaaatgctgaaaaagcggtgaagaaaaaaacaccaatgaaaaacaccatccgccagcggtaagattacaggcggatccttttactatttaacacagtccgcccgcacccgagttttcaaaggaacacccgcaatcttatgaggggaatcagagaataaaaccgtataccggacaaccattcccgcccgcattccgctacctgaacagccaaacatggtgatatgagatccccccgctgcatatcttgtgtattatgccgatttacgaggtgatacacagatggatacgaatccctattatgatgaaaaacaacagaactactacgaaggcctgaatccttatttattaaaaaaaatagacaaaaactggcgtacagtgcttgatgtcggctgcggcaccggtaatttaggcgcggcaattgaagaccgcggaataacggtttacggtattgaagcgtatcccgaagcagctgaaaaggcggaaaacaaattgagccacgtgctttgcggcgacattgaatccgccattcttccgtacaaatcagagcaattcgactgtatgctgttcggagacgtactggagcatcttgtcgacccgtggtcagtgctgaaaaaacttcgcccttatttaaaaaaagacggcacagtgcttgcatgcataccgaatgtcggccatatctcggtggtgcttgagcttttagccggcaaatggacttacagagatgccggattaatggatcagacccacctgcgtttttttacgcgtgaagagactctttccttatttaaagcctccggttatgaggtgaaaagcattgaggcgatccgtgttgatcatccctcttatcacaaggccatcgcatctttgcacgaagtctgcgtacagcttggcataagacatgattttctgacagaggcatcggcctatcaatatgtgattgaggctgagaggagcatgtaatggatgcgcattcgtttctgtttgtcgtctgtgtgaatgatgaatcgctttactcccaatgcaaaaaccatatcctgcagcttaccgttcccccctcacactccgttgatatcatgccggtatacgattcagagagcatgacctcctcctacaacaaagcgctgaaacaccctgccaaatataaaatttatctgcatcaggatacatttatcattcatcagcatttcctgcgagacatgcttcatatctttcaatctcatcgggagctcggccttctcggtgtcgccggctgcaaaactctgccgccgaacggtatttggtgggaaagcgggcatcggctgggaaaagtgattgaataccgggtgaatggttaccgccctctggaatttgaaaacagcgaagaaaacggcctgtttacgcatgctgacgccattgacggattgttaatggccgctcaatatgacgtagagtggcgggaggatttgtttcgcggctttcatttttacgacacatcacagtcgcttgaatttcaaaaacacggctatcaagtcggcgtcgcctgccagaaagagccttggtgccttcatttttgcggtgattcatttgacgccgcggcatatgaagcggacagacaaacatttgtcaaacactatatgggaaagccctcttgctgatgcagagggctttttacagttaccgtttattcaattcccgctcaatgatttgttcaaaggtttcctttcccgctgcgcccgggattctttcatcgccgatgataaacgtcggcactgcggtaatgccggcttcctcataggcatggcggagcgcttcccgctgcatgtgtctgtacgcccttgtctcaagcgcctctttgaacgcgccgccgtcaagtccggcttcttccgcaagctttgtcaggacgttaatgtcactgatattttgttcttcctgaaagaacgcccgaaaaacgcgtgtatggtattcgctttctttcccatgttccttcgcaaaatggaagccttcaaacgccaaatccgtgtaaggatgcggtgatacgcgggggaacgttatatcaacgcctaaagaccgcgccatcggttcaattgagttttcccacatctgccgcttggcggggtcattcaccggatcaagtttcggtgaggggctcggacgcaattcaaacggcatccattccacctgtacgtccttgtccttaattgcttcttcaaacgccgctttgccgacaaagcaaaacggacatacataatcagaatatactttaatctgcagtgtcattgtaaatctcctttctttttcattttaagttgtaacataaatagttacaagtatttttttaaaaaaacaccctccctatggaaggtgtcacgattccagcagcctctgggcgatatattctccttttttacagccgccgggacaggcgaataaggaggagccgatcgtttgtgtgtattcattcagcgcatcctttgccgccaaagctttcagcatcgggacaaattggcggtccgggtctttttgaaagctgataaacagcaggcctgcgtcaacatagcccgtcttcggatcaattccgtccgtataggaaaatgcccgccgcagaatctgtctgccggttgatttcgccacgctgacatgtgagtcggcgggaatttgattcagcttgacgggatcggtttcctttttttgtccgaaaggcgcgcccgagcttttcattcgtccgaacgtgtcttcctgatctttcaaggatgaacggtcccatatttctaaaaacattttaatttttctaaacgccatgtacgtgccgcccgtcatccagtccggctcccctgattgaacccaaacgattgaattcatcaggttttcatccttcgtgctttggttgccggtgccgtctttgaatccgaaaaggttgcgcggggtttcgccgttttttccgccgcttaagaaacctttattgagaaagcggacttcacacacgccgacggcctgtttaatcagattgcgcaccgcgtggaacgcactctgttcattatccgcgcagacttgtatgacgatatcaccgccgccttgtttcttatcgagtttgtcgttaggcatcggcggaatatcggcgaggtgcttcggttttttatccttcagtccgaagcggtccttcccgtctttctcgaaaaaaccggggccgaagccgaaggtaacggttaaattcgccggtgccagatcctgcgactccccggtatcctgcggaggcatatatttatttttctgttcgcctgacagggcggcgcctgaggtcagcagctgcgtcagactggtccaatttctgaaaagggagatgacatcagctttgtcgcttgacatgacatcaagcgccgcaaaatacacatacgtctggtgcgccgttgtgattcccgcttggtgctttccgtaaaaaggaacgatttgatcactttcacttttcccttgactcttctttgaagcggtggccgccggtttgaaaagcggcgcgagtcctccgaggccgctcgctccgacagcgacggcggcgcccgctacggcgccccacttcagaacatcccgtctgtgaatctgtttttccttgttttgttcatcgctcatgctgtgttataactcctttttaaagcacatcggcaatcttcgacatggtttcagaaagggccgtcagctttgtgcttatctctctgatttgatctttacttaatttatcataagacgtatacgagtgatcacccgttttgtatttcgacatcaaaacttcaaattcgctgaattccgtatccagcttttccgtgacgtcggaatggtctttcacaagcgcgcttttcacagtttcatatacggcttttgagccttcgacattagcggccagatctgttaaatcaattcgggagtaacgttcttcttcacccgtgatctttgagatgcccgcttcattgagaagctccatggcgccggcgacgatttgttccggcgtcagtttgagagaagcgatagagccgtcaagctccttcacatcctttaacaggacggcggccgtttctttttcgccagtaatcttattgtccttccagagggctttttcaagcttgtggaagcccgtccatttgtcgccttcttccacatcattttctctggcatcgattctcgggtcaagcgtgccgaggctttcggcaatcggttcaattcgctcgtaatagacgcgcgcctgcggataaagtgattttgctttatcgatgtccccggccttgacggcgtctgtaaacgcttcagccgactttacaagctgatcgctctgttttttcacatatgttttatagtcatcagccgctttcttgagctggtcactcgcctttttgctgcttttttcagcgcccgtcagctcttccagcgaggctgtcagcgatacggattccgatttaatcttctctgtatcaggcttatctttttgtgcttctgtataaatcggctgcaggtgcttttcgatatctgtgtattcaaacggataatcgccgcggattttattttcaaatgagagccagtagctgttcagttctttccctttttgctgaatgcctttccggtcttgttttttaacggattcattcagtttggtgagaatatcctccattttgtcaactgatgttttgatttcctggtttacactgtttttttcggctcctttgtcagacgctgactgctgagcgccgcagcccgagcacaaagcgaggagcaggccggctgacaaagccgctttctggatatgtttcattttgcaacttcccttctattcgattttatttttaagatttccataacgagtgcgacggctaaaaatccgatgatgaccagctgcggaattgtgctgtaaatcgacggatagatgccgagaaatgataccgacggaagccagctttcggcgtcagacggcagaatatccgccagctgcaggctgtggacgcccgtaccgagaaatttcacgcacatatacagcacgacagccatggacagcagaaagaacggctttaacggaatccgcattccgagcttaatcatgagaaaacccgctgccgcaaggatcaacaatcccgccgcggttcctcctattaattctgtaagccgcagcttgccgacgaggccgataaaaaagatcactgtttcaagcccttctctgacgaccgccaaaaaggcgatcagcgcgaaggacagcagactgccttttttaagcgcctgcgatttttgcgtattgattttttcccgccatttatccattgaagcgttccggtggagccagacgccgacatacaggagcatcacggcagacagaatgccggtcacgccgccgagcagaaaattgttttcgccaaaaatgttcgaggaaaacagcagtgtgacgccgactcccgcaccgagagagacgagcatgccgagtgacgctccgccccaaatccaagctgatgaacgggtgacccgggcttttttcgtcatcgtcaaaagcgcgccgatcacaagaagcgcttccattccttcccttaccgggataagagcggcgtccagccagctgtagctgctcgacgcaatcggctcaaggagctgaatcatttcgtcaatatgcttaatggcctgatccgggcggttttcagcttccgccttcataagcgccaggttctcttctgaagtcgtgtaggccgcttttgattgggacacgacgtctccttcgactgccagccaattcgtgacaagctgatcgatttttgtttgggcttcagcggtttggctgctttttatcagctgtttcgtctcttttaagctttgaatataggcagagagtgtaagtcttgagctccctccggctgcgtcttttaatgtgacggcctgccggtaggtttccaagtgggacccaagctcagaaagcgccgcctgtactttttttgtatctttattaatcagagaaagtgaaatcattgcgatattggagttcatttttgagtaggaagatatatttgcttttttgatagcaggctcttcctttttccatacagttttgaattgtgaaaatgttttttcgacggattgcaggtttccgtctcttgcagattgaatcatttgctgattcaggctgataagtgaatcgatgggatcagcgcctttcgccacggcagaagaactgaaaatgacgagcaggctgaataacatgaaagcaatcttccgtgccatcatgcacctcctgtagttgaaaatgattatcattatatatcataatcatagtccgatatcagcctttgtcaataaaaagttgcgcatacagaaaaagggccgtcctcacgggacggcccttctgacagaaacatgtcagctttttgctttggagcgccgaacttcttcaaaaaacctgcgcgccgccgcctttggatcttcggcttggctgatggcgctgatcatgctgacgccgtcagctcccgcttcaatgacgggcgccgcattgtcagctgtgatgccgccgattcctacaatcggaatggtgatgccctgacgtcgcacctcttcaatcaatgtaacgccctgcacagcttcagcatcttttttcgtttcggtcggataaaccggacccattccgacgtaatcggctccggccgcttccgccagcttcacctcggagacgttatgtgccgatacaccgagaatcatatcaccgattgccgctctcgtttcttcggcgtccgcgtcatcctggccgatgtgcactccgtcggcctcaaggcgcaaggccaattcaacatcatcattaataatgaaaggaatgccggcccgcctgcagacatcctgcacctgctttgcaaataaaacaagatcctctcctgttaaagaaccgctccccttttcccgaaattgaaagagcgtagcgccgccctctatggcttttttcaccacagaaacggggtctgcgcttgtattatttgatcccatgataaaataaaccgataaaatatccttcatcatttcccgagaaatacgagtcatttttctgtcaccctttcaattgcagcaagctcggccgcttcttgttccgagatgcccgacagcttgtttaaaagctcaatctggaagctgcccggtcccttatgagacgaattctgagcggcaagctgagctgcgcttccgtatacagaaacggctgaaacggttgcttgcagaacgtcctgctccgctgcgcagaaggctccgatcacagatgtcagcagacaccccgcccccgttaccttcgtcagcagtttatcgccgttatgtacggcgtatatgtcggtgccgtcggagatcacgtcggtttttccggtaatcgcaacgaccgttttcagcctgcttgcagcggtcttggcgagctgaatcagatctcctccggcttcccctgcatccacgccttttatcttccaatcggcggcgccggcaatattggcgatttccgcggcatttccgcgaatgacggacaagcgcacctcctgtatgatcttgcgggctgatgctgtccgaaacggtgtggcgccggcgccgaccggatcaaaaatgaccggaacgccgttttcgttagccgattttccggctgcgatcatcgcttcaaccgaagccgcactgagagtgcctatattcaggacgagcgctccggcgattttcgccatgtcggctgcttcctcgattgcatatgccatgacgggcgatgcgccgagcgcgagcaggccgttagcggtgaagttcgtgacgacattattcgtgatactgtgaacgagcgggctttgctcccgcactttactcaagttttgagctgcggtttgtgcgtccatggtttaatcatccttttttctctttttcggattccataaatacgatttcgtatgttccagccaggctctggcggcaaaggacatatagcggtccttccgccaaataatggctaaatgccacggaatgaccggatgtacgagcggaatggtgctgactttctcaggatcaagaccgcggcagattctttccggcagcaggccgatgccaagattggccgataccatttcactgataaagtcccactgtgacgtttcataaatgacgtgcggtctgaatccggctttcacacattccgtcataattcgattatgaaggacaaaatcctccctgaaaaatatgaaaggctcgtctttcaattcgtgcagactgcattctttctcgtcagcaagccgatgtgacggatggacgacgagcataagggtttcctttacaattgtaaatgtatgaaaaatctcttcattcgcgggaagcacgacaacgccgatatcaagcgagccgtcctccaccccttgctgcactttaatagagccgtcttctacaagctgaaacgtcacatcgggatatgtgacgcggaagtcaccgagcaccctcgggaaaaagccggacccgatcatcggcggaagtccgatgcggacatgccctttcttcacttccataatatcattcagctctgacgtcaggttttggaatgactttgtgatttcctgcgcctgcacatacatgctctgtccggcgtccgtcagttcaacctgccggccattgcggtaaaagagcttgatgccgagctccgtctccaggtttttaatcatttttgagatggtcggctgcgaaacatacagcgactgcgaagccttcgtaaagcttttcaaacgggccacctctaagaaatacgttaagtgccggatgtccatttcatttcatcctttctatagacaaaaggaatagatattattctttatatatattttacctatagcaaaaccttatgtacaatataaatataagggaggcatcatgatgaaaaaattgctgcttaccgttattcaaatcgctctgctgtttatatttgcgcgtctgatcaattgggtcacggcggctcttcatataaatattcccggcagtataatcgggattgtgattcttttcacattattgcatttcaagattatcaagcttgaatggattgagcttggcgcagcatggctccttggcgagctgctgttgtttttcatcccgtctgccgtcggagtgattgaatacggagatattatgtctaaattcggcgtaagcattttacttgtcgtcgtcatcagcacatttgttgtgatggtttcaacaggtacgcttacacagcttatagcaaaaagaaaggagaaaaaacaaacgtgttcatcggaatcttaagtttattcttaactgttttggtgtatttaggagcgaaaaaactctacattcgatttccgcgggtgtatacctcgccgcttctggttacgcccgccgttttggtcggactgctgctgcttgtcaatgtcccgtatcagacatacaatctcggcggcggagtgctgaccgatatgcttcagccggccacagtggcgttcgcgatcccgctttataaatatttcccgattttaaagaaatacgccgtggaaattattttgaacgtggcggtcggttcatgtatcgccattctgtcaacggcctttatcgcgaaatggttccatctcggcagcagcttagtcgacagtctcgtaccgagatccgtgacgacgccgattgccatgaacgtatcagaaatgatcggcggcatgccggccgttacagcggtttttgtcattttaacggctttactgggaacgatcatcgggccgatggtcatccgctatttccgcattgataacgaaattgcccggggcgtgctgctcggaacaagcgcgcacggagcgggaacatctaaagcatttgagctcagctccgtatcaggaacgatctcaagcgtgtccatgattctcgccgcgattatgacgctgtgcgcggccccgattttgctttcgtttatgtcataaaagactgctccttacagagcggtcttttttttggccgtaagaattgttttgtccgtccttcataaaaagacgaaaacacgatatgataagacatgaagtgaaaagactgaagaacggatgtgtcatatgaacggccagcagcgaagcagcatcagaaaaggacttgaagtcgatatcgtcctgaaagccgaccagcgttcagggaagctgacgagaggaatcgtgaaagatattttgacaaactcaagcttccacccgcgcggcattaaggttcgcctagaagacggacgaatcggccgggtgcagcaaattattgaatagaaaaaaggccggggttcacgcccggctttttttttttgttttcataactaaaatcaataattattctccccttttacaaaaaatgtacagctaactattgactcttacgttgcgtaatactttagagtagcaattgaggaggtggaaaaagtgacgggtatgaaagtaaaagaagtagctgaactgattggagtaagcatccgtactctccatcattacgatcaaattggattattgactcctaaagaaaccactgattccggttatcggctttattctgatgagaatcttgaacagctgcaacagatattatttttcaaggagctcgatttttccttaaaagagattaaagaaatcattaatagtccttcatttaaccgaagggaggcattactattacaaaagaaaatgttgattgagaaacgaaatagagtagacaagatgattgaaaccatagataaatcaatcaaacatatcaagggagaaatctccatgacaaacaaagagaggtttgaaggtattcactttaagcataatctttatgaacaagaagctcgcaaacggtggggcgatcaacccgtcgatgaggtaaatataagattgaaaaacatgactgatgacgagcaaaaagatttatctgataagtggactgcaatgttcaatacatttgcacttcttattaatcaatccccgaagtctccagaagtacaaacagctatcaaagaatggtttgattttctaaatgagaattttggtgaatattcttttgatgccttttatggattaggtcaactctatattgaagatacacgcttcactaaaaacatcgatcagtatggtgaagggttggcgaagcttatgagtgatgccattaaattttttatagacagtcaaaaaaaagggtgataccaattaaaatcattatggaggatacaattaggcaatacgaaaagttattttcaatgactgaaaatagagaagattactatcgatattcaatgatgaaaccttttgaagacatgtggaaacagattaatgttcccttaaaggcaaagcaccctaacggatatgatgtaatagtagcgacaaatatgatgggctatctgagcgtaacggaaacggaaaccggcagaaaagcattagagaacctaaaagaaattcaagctcatcagattgcatttgacactttaactcattgtgttgaatttatcgaacaaaacaacttaaaaataaatgctgatgaaataagatttgggatgtatctagctaatcaaaaaaagcttgaattacataaaggatattgtggatttggaggaattccagggtttattcaaatttgtatatttcccaattcatataatataccaagactgcccgctgtcattgctcatgaatttcatcataatattcgtttttcatatttcaattgggattatgggaacgtaacggtcggtgattacttaattatagaggggttagcagaatcatttgccaaagaactttacggagaaacgcttttaggtccttgggttacttcctttgaaaaagaagacctagaatactcaaaagaaatcttcaaagactcattacatattaaaggatttgatgaggtcagcagttacatgtttggtgacacttttgcagctcaacaaggttatcagcctgttggcttatcaccatttgcaggctatgcggtaggctaccaggctgtgcaatccttcatgaaagccaacaatgtggggataagagaggccaccttacttgatacggatgagatactaagtaatagcggactgtttctttaataacgtttggacagtaagaaagtcattattattttggcccaatttaaagcgacggaggaggggtttcttttccctctctccacgctataaacgataatcctattttttccgcaagaaaacgaccttcaaatagttcccttctttaaacgcgggtatcgttttaaaatcctccggaagcgtatattcttccaaaatgtcgtaactctcgtttgtttctttaaaggcagcctctataaagcctttaaatttcttcatgttgaaggcgctgctgtttgtcgatgcaacgatgatgccgtttttcgcggtgatggcgatcgtttccttcagcaggtttttataatctttcgccgcgctgaacgtccgtttttttgtgcgggcgaaagaaggcggatcaaggatgatgaggtcaaatgccagcccttttttctccgcatagccgaagtatttgaatacatccataaccttaatgtcatgcgcctcataatcaattccgttggcgctgaactgttcaatcgtttttgccaggctgcggttggcgacatcgacgcttgtcgttttctctgctcctccaagcgccgccgcaacggaaaatgctcccgtataagagaacgtattcagcacccgtctgccgtttgcatacttgtcccgaatcgctttgcgcacatgacgctggtctaagaaaatgcccgtcatcgccccgtcgtttaaatccacagcgtactgtatcccgttttcttgaacaatgaccggaaaatctcctctttcgcctttgacaaaatcgtcgtcttccacatattgtccggcggtatcaaaccgtttcttttcgtagatcgccttataagacagctccagcccgtcaatcgcctcaatcaaactgtccttatatgcgtaaatgcctttgctgtaccattgaatcagcagataaccgtcatagaagtcaatcgtgacgccgccgatgccgtcgccctcaccgttgaaaagacggaacgccgttgtatcagacgccttaaacagatgggcccttgcttcagccgcttttttcagcttgtccagaaagaaacgtccgtcgatccgttcatctctcgcacgggacagcacccagccgactcctttattctgcaaaccgtaatagcctttcccgataaattcgcccttctcggatgtcacatcaaaaagatcgccctctgttaagtgagccgagcttccggacagagcgtctttttcaatcagggggaatccttttttcagctttccggcaaatgtatctttcactgtaagtagcttcattgtgcattcctctttcgttttgctttctcttatcgtaccataaaacatgcattgtcccgaaaaattcaaaacagggggaaaaccatgacagccaaaagaatcgaccatacaggcattatggtcaaagatattgaaacatccatcgccttttatcaagacgttctcggtatgacgttaaaggaccggatcacccatacaaacggcattattgaactcgcctttctcggatttcaggaagggcccgagacagagattgaattgatccaaggttacagcagcgagcttcccgcagaaggaaaagtgcatcatatcgctttattaactgaagatatcgcagcggaattcacgcatgcgaaacgtcagggcgccgtatttattgatgaagaaatcacgacgcttcccaacggataccgctacttttacattgaaggacctgacggcgaatggattgaatttttccagcgttaaaaaaacgggcggaagcgcccgttttttatgtttcttctgtgccgttttgcgccgcttcccgttcctctctccatttttgaagatcccaaattctgaaaaacggataataaatgataaatgtaatcaggaggttgatcagctgcatcaccgaaccggagattttcccgcctgtcgccagataacctgaaatcagcggcggcatcgtccatggcacggcgattcccgccggttttgccaccatccccgtgctcatcccaatgtacgtcgccgtaatggtcaagagcggcgcgatgataaaaggcacgattaacagcggattcatgacgagcggcattccgaaaataatcggttcgttaatgttaaatatcgcaggcccgataccgagacggccgagctgtttcatctgtttgcttctggagcgcacaagcatggtcagcacaagggccagcgtcgctccgcttccgccgacattaatccatatttgaaagaactgtgtcgtaaaaatgctcggcagcgcttctcccgcttgaaaagccaaacggttggcgtccatcgccccgtaccagatcggtgacatgaccccgccgataatggatgcgccgtgtatgccgcaggaccaaagcagcatttgcacgaattcggcgacgaggcttccgccgagactcccgcctaaaatagacagcggggtgcccagcaggtcgcctacgacattgtggaggcttttaaatggagtcatttcaataaacagacgggccaaccaaacaagcgtaataataaagaaaccgggaatgagcgcgacgaacgatttgctgaccgcaggcggcactccgtcaggcatcttaatgacgatatttctttggatgataaatcggtacacttccgtagacagcattgcaatgatcatcgcgacaaacagacctttgcttccgagcagcgaaatcgggatgccgcctcccaccataatctctgttgccgagccgtcaggaataaacggaatctgatacggcgtcgccaataaaaaggcagcaagggcaatggctcccgacgacagggcatccacctcatagctttccgcaagccggtaagctattccaaaggcggcgacgagcgccataatgtcaaaggacgcattcaccggatacccgagcttttcaacccaatgttcaccgaaaagacccgccataaaatcggcgtaaccgggaatcgggagactcgtcagaatcagaaaaaccgatccgataataataagcggcatagacagaataatgccgtcacgcaaagctcttaagtgcctttgaccggcgacttttccggcgacaggcatgattttttcttccattacccgattgaacgtactcatttatcaaaaaaccccctttttgagttcattgcgcagatatcttattgcattttcttcatcatattttgaaagcgtttacatttgcatacagaaattttcctttccccttaggaaaaaaagaattccgcactgccgatatataaagaaaaaagggggaaccacgatgcatcacatcctaaaaccgataacggccgctgccttgtgcgtcagcctgttttccgccgcggcgccagcgcacgccgagacgcacgaccgggacgttatcgtagtgtacaaaaatcaaaacggcaaggaatccgccatagacagcggagcggatgtggaacagacctatcagcatctcccggcagtcgccgtgtcggccgattcgcaaacggtgaaagacctgaagcaagatcctgacatcttatatgtagaagacaatgtaccctttcaggcagcaggcggctctgatgtacacctgttatcagcggctccaagcagcagttacgtgctgccgcaatgggatatagaaccgactcaggtcaagcaggcctggaaagaaggcttgacgggaaaaaaagtgaaagtggctgtcattgacagcgggatttatcctcatgatgacctttccattgcgggaggctattccgcagtcagctatacatcctcatacaaagatgacaacggacacggtacgcatgtcgccggaatcattgcggccaagcatgacggatacggcattgatggcatcgcgccggatgtccggttatatgcggttaaagctttggatcgaaaaggtgcgggagatcttaaaagccttcttaaagcgatcgactggtcaatcgccaataaaatggacatcatcaatatgagtctcggaacaaacgcagacagcaaaattcttcacgacgccgtcgacaaagcatacaaaaaaggaatcgtgatcgtagccgccgcaggaaatgacggcaacaaaaaacccgtcaattatccgggcgcctacagcagcgtaacggcagtctcagcgtcaaccgaaacaaacgggcttgcggcgttttccacgaccggaaaacaaattgaattcgccgcacccggcaccaatataacaagcacttacctgaatcaaatgtatgcaacggcggacgggacctctcaagccgcgccgcacgtcaccggcatgttcgcgctgctcaagcagaaatatccggaggaaacaaatacgcagctccgacagcagatgcagcaaaacgtcaaagacctgggcgctcccggacgtgacagccaattcggttacgggctggtgcaatattatacgaaccaaaagagttttgccgaacgggccgtcataaaagcggaaaaaacgaaaaagcaggcagatatcaatcaagcaaaaacgtcggtcagcaaacttcccaagtcaaagggaaaaaccgcacttgagacgcgaatcaataaagttcaagccgcaagaaatgtgacggatgcaagagacaaagtccggactgccgaaaaacaaaagaaaaaaaacgccgtcaatgccgcccaaagcgccatccgcaaattagcggccggctcagagaaaaaagggctgcaaaagcggcttgatgctgtcaactcaggccttttgaaaacagccgaagccagcgtcaagcaggcggaaaaaaagacctctgagaccaacgccgccaaagcaaaaaaagtagtcagcgagctccagccgggaaaagaaaaaaccgccctggaaaaacggcttgacaggataaaagataagatcaaccggaagcaagcaagagacaaagtgaaaacggccgaaaaaaccaaaacgaaaaaggcaaaatcagcggcacaaacggcggtcagccggctgaagccgtctgccgaaaagaccggtctgcaaaaacgtgtgcgcgcgatccgggtgaaacattaaaaaacgcttatgagccggataacggcttcacaagcgttttcatcacacctgcctattggttcatagccgggcggtcgatcgtgttccatttcgtaaaggacatataacggaaataatgatcacggtacgggtgcgcggtacctgtattccaaggcttgtctcctccgcagaaatggacgatggccggctcggcacgtgtttctctgtatcgtatacggtcaatcagttcaggaggcgttttctcattcatgataatatgcgtctgcgcattccagcgcggatgcagttcatgccattgatcatataagatcgcgttaagcgcgtcctgatcatgaaatacgagaaaatcctccgaactgttttcattgataaaatcaatcaccttttcggaaatattttgttttctccaaggttcgaaatctataatcataatgccggaattaaaatatttggcagtatcgctgatattcatttttttcagtctgtcatgctgtccggcatcttctaccgccgcaacaattgccggggaaatattcaaatcccatagagctgaaatatcttccatcacaatcgcatcgcaatcaatgtagatcatccgcttcacagactcatccttaattaaatcaggaatggaaatgcggtaataagccgcttttgtaatgtggctgctttcgacggcatgcttgtattgatcagcatccacttctaaaaattcaagcggcgctccgaatgacgtcgcagtctgttcaagcttgtccttgttttcggcagtaattccgccgtcgattacatataatttcgcatcccttgttttatccatattcatcaataaagaagcgaacatcccacccaaatgacgagcataatgatcatcggcacatgatacgatatgcattgtttcattctttcccactgatattcatctccctttttgttgtacaaatgtctttccctttttttaaaaagtaaaccttgatctcacacatttttttgcgcgggaatgtgctgtttacgatttgatattcgctttctctgtacaatttatttctgatttgaaatcaggaaaggggaaatgattttagcgaaaacaatcgtcagaatgtaccacggcaggaaatcggcgggtgcggcggagtcaaagcgaacggggagaaaacgggagcccttcataccgttattaccgcaggaaacggcgtaacaatccggggaggcaagcgatgcacgtaaacggataaacaacagccggactgctcataaaagcggtccggctgtttgtaatgctaatcgacttctttcttaatcccaagcattttttcgtctaaataatgggcgatttccgccgcttccttcagctcgtcggtcagatgcttcgggacttcgttattcaatttataataaattttatgctcaagactcgcccaaaaatccatggcgatggtgcggatttggatttccgccttcacatattccacacgattcgtcaaataaacgggaatttcaataatcaaatgcaggctgcggtagccgttcggcttcggatgtttgatataatccttcaccttcacaattttcaggtccttatgctgcttcaaaacctcagcgacattataaatatcggaaataaaggaacagataatcctgacacccgcgatatcatgaatatgctctttcatttcctgcgtcgtcacatcgcagcctttgcgcatcagtttgttgacgatgctctcaaaacttttcacgcgtgattttgtatgctcgatcgggttatgcccgtgaatcagattatattcctggctgatgatagaaaacttcgtatccagctcatctaaagcaaatttataaactaataattcatttttccaatcttccataactgtttttaaatcatccatatgggctgttgacaagtccatttttttcatctccttgctttgctgtccacgtattagacgggtcggtccgcagtgaggttctttacaaaatcgtgaagattatttcataaaaaaaaaaagcaaatgccggttatggcacttgcttttttaattgatcagcggaaataactgatcaggagtccgattgaaagcaggaatccgaagaatgtattggtttgcgctgttgatttcatcgcaataatcatgttcatcggcatttcgtttttcacaaagcctttcacggcctgaatcggtttcggcacgctcaaaaagaccaggaacagccacggacttgtgtaccccatgatgacaagaccgacgatccaaatgtaagcaatggcaaaggatgcggccagtattatgacggctcctctatgccccatcaaaatcgccagcgttttacgtccgccctttttatcttcttcaatatcacggatattgttggacaggttaatcgctccgaccaatatggcgatcggaatggaaatcaaaatgctctgttcattaacttcgcctgtctgaataaagaaagaaataaggacaaatacagatcccatgcaaatgccggagaacagttccccgaacggtgtatacgcaatcggcagcgggccgcccgtatacaggtagccgatcagcatgccggcaagaccgattgccgcaagccaccagctgctgctcatgcagatataaacaccgagcacgagggcgatcgcataagagccgagcgccagctgcagaattgttttcggcttcatgccgtggcggacgatcgctccgccgataccgacggaatcctccgtatctaaaccgcgtttaaaatcgtaatattcattgaataagttcgtggcgatctgaatccaaaggcaggaaaacagcatggccaaaaacagcaggaaatcaacctttacgtaaaacatcgccaatacggtgccgagaagtacgggcacaaacgatgccgtcaatgtatgagggcgggttaactgccacaaaatacggcccatgctttctttttcaggcgtcttttggctgcctcccatattgttttgattcattttcctcttcctttctattaaaaggctttcacagtcagccgataacagtagtgttgaattggggttttcatgttttctgctaccttatctatcataataatttcttcctcatttcacaagatgcggcgctttatcagctttcctgccggaaacggcttttcgcccttctccattgggattcggcacaagccggcgcaagaaaaagccggcaaattttttttacctcatttatattttcgataagttaaaaatcccgcctgcacagcgcttttttagtatgatctttcgccaatttttacatgcgtgttttccagccttttgtttctcattcatttttaaggaaattttaagcttaggatattagacatattttgaaactttttgttaatctaatcgtcatatactggtgtaattattgaatacgcgggaaggaatttaacatgatgcaaaaattaaaacgtgcttatgaaaatacattggtcaaatggacgtttcatacaggattttattttctgatattagtattgctcttttggatgtatggttttcatacagcaaataccggcacttatatttacaacgatttctaatcggggaggataactatgaaactacttgatgctataaaaacatacgcagacgtcaagcctcaggccgaagcgtttcgttccttagatcattccctcacttacggggaattatgggatttgtcggagcgggtcgcgtccggcattcaaaaacatacggctgacggttcgaaaacgcctgttctggtttacggacatatggagccgaatatgatcgtttctttcttaggaagcgtcaaagcgggccgcccttacatccctgtcgatgtatccattccggcggagcggatcgtcaaaatcattgaaagctcaggcgcagagctgctcatcagcgtatcgggcgatgcagtcgatacgggaagcaatctgattaaaaccgttacacccgaagaacttgcagctgacggagatgcagacctcagccgtgagaactgggtaaaagagctggacactttttacattatctacacgtccggcagcacgggaaatccgaagggcgtgcaaatatcagctgataacctgcaaagcttcactgactggatctgcagggattttcctgtgggcgaaggcaagacattcttaaaccaagctccgttttcttttgatttgtctgtcatggatattttcccgtcacttcaaacgggcggtacgctgcactgcgtaacgaaagacaaaatcaataagccgaaagtattattcgaagagctggagaaatccaaactgaacgtctggacatcgactccgtctttcgtccaaatgtgcctgatggaccccggctttacgcaggagctcctgcctgacgcagaagtatttatgttttgcggagaagcccttccggctgccgtggcgcaggaactgttaaaccgttttccgaaggcccgcgtattcaatacatacggcccgactgaaacaacggttgccgtcacctctgttgagattacgcagcaggtcatcgatgaaaacgaatctctgcccgtcggttttgcaaaacccgatatgaatatcttcatcatggatgaaaacgggaataagcttccggacggagaaaaaggggaaatcatcatcgccggcccgagcgtgagcaaaggctatctcggagagccgtctctgacggaaaaagcgtttttctctgttgacggacagtgggcatatcatacgggtgatgccggttatgctcaagaaggtcagattttctgccaaggacgccttgatttccagattaagcttcacggctaccgcatggaacttgaagaaatcgaagtccatgtaaggcagtctcaatatgtacgctcagcggttgtcatcccgtatcagcctaacggaactgtggaatatctaattgccgccatcgtgcctgaaaaacatgattttgaaaaagaattccagctgacaagcgccattaagaaagaactggccgcttcgcttccggcctacatgattccgagaaaattcatttatcaggatcacattcaaatgactgcgaacggaaaaatcgaccgtaaacgcattggcgaagaggttcttgtatgacgccttacagctcgtttttcttctttatcttacttggaatccttctcttgccgacgattattttagggctgaacggcaagagattccaaggatacaacatgtttatatccatcatcgtattggctttgattttctcgcatgatctgcacggcgtaatcgcattatgtatctttacgctctggcaggtgcttttaatcagggggtatctcgcttacagactgaaagccaacagcggctttgtcttcagcatggccgtgatcgcgtccattttacccctgtttttatctaaattatggccgtttttctttccgccggcgcctcatcatccggttcaaaacctgatcagtttcttagggatttcttatttgacatttaaaggcgtccagctgatcatggaaacgagagacgggctgattaaagaaaaaatgcctatacaccgtcttttgtactttattatgtttttcccgaccatttcttccggtccgatcgacagataccgcagatttgccaaggacgaacagaaagtatggtcaaaggaagaatacgctgatttattgtataccggcattcataaaatttttatcggtttcttgtacaaattcattatcggatatgcgattaacacgtacttcattatgaatctgtctcatatcacccacagcaaactgtggggtaatgtgctgtacatgtacggatacagcttgtacctgttttttgattttgcgggttacacgatgtttgccgtcggtgtcagctacattatgggtatcaaatctccggaaaactttaataagccgtttatcagcagaaacattaaagacttctggaaccgctggcacatgtccttatccttttggttcagagactacgtatttatgcgctttgtattctggatgacaaagaaaaaatggataaagaaccggatggccgtctcgaacatcgggtatttcctgctgttcatgctgatgggcgtctggcatggacttgccctgcaatatattgtgtacggactgtaccacgccgtgttaatgacagggtataacttttttgagaagtggaataagaaatacaagtggctgcctgccaaccgttttacggcctttttagccattgtcatcacattccatttcgtatgtttcggattttatattttctcaggaaaaccatttcatcatcactaaaggagattgaaaacacatggaatttaaacaagaagtattggacgtattagcggaagtttgtcaggaggacgttgttaaagaaaatcctgatattgaaatctttgaagaaggactgcttgattctttcggaactgtagagctgcttgttgccattgaaaaccgtttcggcattacagtgcccatcactgaatttgaccgtgacgaatggaacacgccaaacaacattgtaaacaaactgactgagttgaagtaaatgaaaaagcgtttctttggacctattattttagcgtttgtcctgtttgtcggagctatcgcagttccggcttcatggcttacgcgcttcatacctgaaaaacgtgtcgaagagtcggcagcggccctaaacccgaatatgttccaagggctctatctgcaaaacaaaatgttcgaagactcgaagtatctgccgattttcggttcttccgagctttcaagactggatgagtttcatccgtccaactattttcaagtgaacaaccaaggctttacgccttatcttgtcggaaaaggcggttcgcaatctttaattcatgccataaattttgccgctcatgctgaccagcttaaaggcagaaagatggtatttattgtatcaccgcaatggtttacaaaacacggttcaaatgagcagcattttgctcctaatttctcatcattacaagctcttgacttggcttttaatcacagcattgagccaaaactgaaaaaacaaatgatgaagcgtatgctgcactacaaagttgtcaagaacgatgcagtcctgtctgaactgtataaagcatctgtcaaaggtcagacttggaaagtaaacgcattaacaccggctgcgaagctttattataatatcttagaaaagaaggatctttattattcgatagaagagccgcaaggaccaaagcgttacattaataacaatttaaagggaaaatcctggtctcagcttgaaaaacttgctgctcaatatggtaaagatcactcccgttctaatccgtttttcatagacgattctgtttataaaacgatcaagaacaaagtgcctaaagccaaaggttcaaacaaaggcagaacatacgcctataaaaagtcactggagttcagcgattttgaagatatgcttaatattctgaaggatgccggggctaagccgatgttcgtcgtcattcccgtaaatgggaagttttacgattacaccgatttcccgaaaaaaggccggactgattactacaagaaagtcacaaagcaaattaaagcgaagggctttcaggttgccgacttatccggtcacgaatatgatccgtactttatgaaagacaccatccatatcgcctggaagggctgggtgtacgtcgataaagcgatggagcagttttacaaaaccggcaaggtgacggttcactgagcatggtgatgatcgaatacggaaaaaacgaacacgcagggggcatttctcccctgctttttatgtgatttgattttttcacaaatttgaggaaaactattgcgaatatttgttgaaggtatacaatagaatataaattattttcaaataagtttgacaataacaccaatagggagacagaacattatgaaacaagacattcgtgttgaattgacttcagccaaaaaaccgaaaccggacccccatgacctcgcgttcggcagaattttcacagaccatatgtttgtcatggattacgacgccgatcaaggctggtacgatccgagaattatcccttatcagcccgtctcaatggatcctgcggctatggtttatcattacgggcaaaccgttttcgaagggcttaaagcgtacgtaacgaaggatcaggaggtgcttctgttcagaccagagaaaaatatggagcgcctgaatcagtcaaatgaccgcctttgcatcccgctcattgatgaagagcttgttcttgaaggcctgaagcagctcgtagccatcgacaaagactggattccgaaagcggaaggcacttccctttacatccgtccgtttatcattgcgaccgagcctttcctcggtgtagcggcatcccatacgtacaagctttttatcattctttcgccggtcggctcttattacaaagaaggcattaaaccggtgaaaatcgccgtagaaaatgaattcgtgcgcgccgtcaaaggcggtacgggaaacgcgaaaacggccggcaactacgcatcaagcctgaaggcgcagcaggttgcggaagagaaaggcttttctcaggtgttatggctcgacggcattgaaaaaaaatacattgaagaagtcggcagcatgaacatctttttcaaaatcagcggcgagatcgtgacgccggagctgaacggaagcattcttgaaggaattacgagaaattccgtcatcgcccttctcaaacattggggactgactgtgtctgagcggaaaatttctatcgacgaagtcattcaggcgcatcgtgacggccgcttggaagaaacattcggaaccggtacggcggcagtcatttcaccggtcggcgaattgatctggaatgatgaaagtcttgtcatcggcagcggtgaaaccggagagatctcgaagaaattgtatgataccattacaggcattcaaaaaggcgcggaggccgacgtgttcggctggacgacggaagtcgcctcattaagcaaatcaaaataaacaaaaaacccggaaatgaatccgggtttttttggtgcttttatgcttcaatcgacttaaagaaatgaggcagatgttctttgtgcgcctcaatcatttcatccagaatggcctttgccacagtgtctgacgggacgagagggttgatcgtcatcgcgagaagcgccgtttgataatctcccgtgacggctgcttcagcggcgacacgctcaaaggacttgatttgctggacgaggccgcggacagacaccggcagatcaccgacggcgatcggtttcggaccgtctttcgttatgacacagttcacttcgaccgctgaatcactcgggatgctggcgattgcgccgctgtttattgtattgacgggctggatatcatgtttgtcgttatagatggagctgatcaggttgcaggccgcgtcactgtagtacgccccgcctcgtttttcaagctgcggcggtttgatggcgagattcgggtctttatacagttcgaacagttctttctcaaccttctgcacgacctcggcgcgtgtgccctccgtttgagacgcttctatttcgtgctcgagcatttctttcgttttgaaataatagcggtggtagccgcaaggaatcagatcaagcgccttcaggaactcaggctcccattccgccccggaaatgtttttcatcgtcatggcgttttccggatctcccatggcttcaatgactttatccttcacgctgatgccgtctaagaaaacatctaatccgaagaccatgtgattcagcccggcaaattgcacttcaatccggctgacatccacatccaatgcttttgcgacgcccattttaatgccgatcggcacattgcagagaccgacgacttttgtcagattcgagtagcggagcagagcttcggtgaccatgccggcagggtttgtaaagttcacaagccatgcattcggacaaagctcttcgatgtctttcgcgatgtccagaatgaccggaatggtgcgcagccctttgaataaaccgcccggaccgtttgtctcctggccgattacgccgtattttaacggaatccgttcatctttggcgcgggcctcaagaaggccgacgcggaattgagtcgtcacgaagtctgcatccttcaaggcttctctgcggtcaagcgtcaggtggatttctatcggaagccccgctttttcgaccatgcgttttgcaagcgtgccgacgatattgagttttttctcgccttcgggaatgtcgacgagccataattctctgacaggcagttcatcatagcgtttgattatgccctctacaagctccggcgtataacttgaacctccgccgatcgttacgattttaattccttttgtcatattgttgctcccccttgcagactcactttttcataaatcgcgactaactctgcggccaaatctttcacggtcatggcattcattaagtgatcttgcgcatgtaccatcaaaagcgtcatgtctgttttttctccgccggcttcgttttggatcaattctgtctgataatgatgggcttctgtcagttcccttgcggcttcctgaagctttttttccgccagggctctgtctccctgctttgcggcggctatggcttccattgaggcgcttctgccgtttccgccatgcaggatgatctgaaaaatggtctgttccattttctcattcatgtgtttcactccctttctctacagcacggctgtttcgtctccctgtacggctgacgcctgcgattgttcaagttcgttttcttctttcagcttttgtgaatcccacattctgaagaacgggtagtacacgataaaggctgtgatgatattaatcgcctgcatgacagcccctgatatttttccgcctgtggcaagatatccggaaaaaatcggcggcatcgtccatgggacggcaatgccggcaggtttggcgacgaggccggtgctcatgccgatataggtcagtgtcagtgtgacgagcggtgtgatgatgaacgggatgagaagcatcgggttcatgacgatcggcattccgaaaataatcggctcattaatattaaagatggccggcccgatggcgagtttcccaagctgcttcatctgtttgcttcgggcgcggagaaacatggtgaccacgagcgccagtgtcgcgccgcttccgccgatgttaatccagatttcaaagaactgctgggtaaaaatattcggaagcgcatcgcccgcctgaaaagcaacccggttcgcatccatcgctccgtaccagatcggcgccataacgccgccgacaatatttgctccgtgtaacccgcacgcccacaagagcatttgaaccgcttcagctatcaggcttccgccgagacttccgccgagaatcgagagcggcgtccccagtaaaacgcttacaatattatgaagactctcaaatggcgtcgcttcgacaattaaacgcgcgccccagatcagaaagataacggcaaagccgggaattaaagcgacaaacgatttgctgaccgccggaggcacgccgtccggcattttaaatacgaaattccgctgtatgatcaggcggtaaatctccgttgacagcatggcgatgatcatcgcgacaaacagccctttgcttcccatgagagaaagcggaatgccgccgcccaccatgatttcctccttagcgcctgcaggcagaaacggcactttgtacggcgttgccaaaagaaacgccgccagagatatcgcaccggccgataaagcgtctaccccatatttttcggccaggcgataggcgatcccgaaagcggcgacaagacccatgatttcaaaggtcgcatcaaccggatattgcagtttttgagaccacgagcttccgaacgtattagccatgaaatccgcatatcccggaatcggcaggttgccgatgatcagaaaaaatgaaccgatgataataagaggcatggtgaggatgatcccgtcccgcaatgcttgcagatgccgctgagaggcaatttttccggcaatgggcatgactttctcttctaaaaactgattcaccttattcacacggcccgcccctttctatgatgcgtttccgagctgttctgctgatttcagaacttccgccccgttgcatgtgccgtaatggacggtattgatgacttcaaccggcactccttttgattcaccaagttttttcagctgcggaagcaaataacggacttgaggcccaagcagcaatacgtccgctttatcaatatgctgcttgactgaatcgcctgacaccgcccagattttatattctttcccttgttcctgcgcgcttttttccatcttggtaacgagtaagcttgtagacatccctgctgcacaaacgagtaatatattcatgtgaaagacctcctgaaagtttgatattttgtatgtctcgatgttagtaccatcatattatgaaatcgctttcataactactcaggctttttccgctgctaacggaaaaaaggtgtatcccggtctttctcagatcgtttgtctctgaatacttgtaaaacctcctgataggttgtgcattttaaaagacggctcaccgcggcctgatcatctagcatgccgccgagccatttgtacatatgctggaggtcggctttgttttctttctcgacgcagagcaggcagacaaattggacacgcttatttgcccagtcaatcggcttcttcagcgtgcataccgcccaaaacgtcgtgtctgtctggggaacgaggggatgcggaatcgccgtgagattgccgaagctcgtaggagaaatcgcttccctttcaaaaatagaatcggtcagggaatcagaggcgaggccggcttctgcaaccttctgtccgagaaaacggatgacgtcctccttcgtctccagatcctgctgcaaaaatatcagctccggtttcagaaagttcaattgttcccgcttttcttccagcatggcatcaattttggtaaagtccccgccgcccaacagcgtatgaacctttaatacgggaacgggcaagtctattttgatcggcacggtgctgaccacaaaatcaatcgactcaaaagaaagctggtcaagactgtagtaatcagccgttccgacgatttcaaggcgctttccgaaccgggaacgcagcttttctcttaaaagctgcgcactgccggcgccggacgcacagacaatcaaacagcgtttaggcggccgttccgtctttctcctttcgatggcggctccgaaatgcagcgccaaatatccgatctcattttcatgaatatcaatgccggtttgctccttgatcacgattcccgcaatcactcccgcttcaaatgcgagtggataattttcttttatagcggaaagcatcgggtttctcaggttcattccgtagcggtttcggttaatcgccggcttgatatggagcgcaagacccgttttcagctcattgtcgtccgtgattccgagctccagctccctctcaatggcttcaatcatggcctccgttaaacggctggtttccccgtctatcagccttgtaaactcttttccttcaatttgtgactgggtcatgcgctttgtccccagcaggtgaatggcgatataggcggtttcctgttcgggaaaggtgacggaaagcgccgattcaagctcatttacgatggcttccgctgactgatattctgtttcaagcttaatgtcatgaagatcctccgggatgagagatacatagttttccgtccggattcgtttgcaggcaatggcgatatggatgatgagattgttcaggccgaagaaagaaagcgggatcttgtggtttcgaacctgcttcataatggctgtgcggatcacatgaatgtcttctttcggcaaaataccggccttctcattcaggagatcaggctcaggctcgcggtcgtccactaagtattccgccatacaataacggaggcggagctcttcgccgcgcagcttaaatccgcagttcggccttgtttccaaaacgatgtcataagggcggagccgtttttttacttctttcagatcagattgaagagtcgatttactgatgaacagttcttctgccaagtcatccagcttgaggcagccgtcggtcagaagcagtcttttcataagataatgaatccgttcatcgggaaaaatcggcacggcgctgttctgctggaaattgtcctgaagccagtttttaaattgctgctcattgcggatcagcagcttatagccgctccctctgacagattgaatggaagcgccgtttttttctacaacggtttgcagttcctttatgtcattgcggaccgtccgcgtcgttacctttacatttgcagcgatgactgagcttgtaatcggtgtttcagcagctaaaagcaagcgcagaagttcacgaagccgcccatgaagcatgagaaaaacctcctatcagatcaaatgcagttgtaaaaaatgggcaaaaaggatgaggaaggggtaaatgtaatgtaaattctataatggggaggatttcaagtcaatgaggcagcccgatagaaagcccgtaaaaaaacagccggatcagccggctgttcgggatgcggacatgcggtttcgcttagatgccttccgttcttttataatttttctaatgatcggatagatgacgggcgcccatttgataattgttttgaaaaattttttcaatgtctgaatcccctttcttttaccttgtctttcccctgttatcagcagctgtaaacatggtcagcgtgagacataccgatttcccgtcacccaatagcgccacggataatcccgggcttctccgctgttttcaatcccgattctcgggcctgttgatatatgctccggcgtaaagccttccgtaataaacagcggcggttccgtgatcatgccgccatagtcactcattgaaatgcccatcgcctttgtgagttttcccgggccgtttgtccactctctagggcgtctgcccggtctcctgcgctccatcaggaactgtccttcatgaggttctgccgccctgattaacacggcctgcggaatgccgatgtcagcggcgacaacattcattaatgtatgggtgtgcatgacgtatgtataaatgcggcccgcctcatggaacatgatttcagtccgtttcgtgcgccgattgccgaagctgtgcgccgcccggtcttccactcccatataagcttccgtttcaacgatgaagcctgatgccgttccctcatccgtctccttcaccaagagacagccgagcaataaaggagcaagctccactgacggcctctggaaaaattcaatcggcaaaggctttcgttctcccgtcatccgtcttcctccttttctgaatatagcgatttccctctttcacgtttttcacttcttttttacaatataaacatgaaagaaaaaagggcgtcatgttgaacactctattgcgttttgaaaatcggctggttataatatgatggttcaactgaaaatgattctcatgttcaataaatgccggacaatgatcataaaagtaggtgaattgatttttgagcgattctgtcacgtccgcaaaccgtctgctcagcatcttaaaaaacgggattttcttcctggctgcggtgctcggactgcttgtttctatttttttcgccgtctcattcggcgcgaaagacattactttacatacggtttggtcggctgttgctgattacaatccaaacattacgggccagcagatcattcatgaattgcgtctgccgagagtgctcggagcggccgttacaggagccgcgtttgcagcagccggcgccctcatgcagggtgtcacgagaaacccgcttgccgattcgggtgtcttaggcgtaaacgcaggagccatgtttgttgttgcgcttagctttgcttttttccctcatttgtcatacgcgctgctgatggtgctgtcatttttcggcgcactggcaagcacagccttgattttctttatcagtgcggcgggaaaaggcagcatgacacctttaaaggtgacgcttgccggggcggttgtagccgctcttttgcattcactcagtacgggtgtggcgatttattacgatttaagccaggatttggccttctggtatgccggcggggtatcagggatcaagtgggcacatttacaagtcctcgttcccgtcattacggtcttcatcattctcgcgacattcatgggccggtccgtcacccttctctcaatgggcaatgacgttgcggcgaatttaggggtgaacacggctctgacgcgtgccgccggattaatgatcgccgtcgttcttgccggtgtgtctgtctcggctgccggtgcaatcggcttcgtcgggctggtcattccccatatcgcacggaagatcgtcggcgttacgtacaggctgattattccgatgtccgcgttgcttggcgcgattcttttgattttggccgacttggcctcgcggacagtcagtcccccgagagaattggcgataggcattatggtcgcacttgtcggtgtccctttctttctttatattgctcgcaaggaagggagagaattataagtgaaggttcagaaggaaacaaaaaaagcgtcggcggcaggcctcattctgctggtcatcgccgtttgcattatcctgatcgggttacatacgggctcattccggctttctcctcttacggtgggaaaaacgctgttcggatacggcacgtttcaaagcacaaccgttttatttgattatcggcttccacggattctggtgacgatgctggccggtatcggtttaggcgtgtcgggcgctattttgcagggcgtatcccgaaacccgcttgccgatccgggcattctcggactgcatgccggcgcttcgttcggtctgatgatttatatcacgttctttcattcactggaggcgcaggcgtcgatgttcatcccgttatttacgtttgcgggcggaaccctcgctgccctgctgatcgtggtccttacgtacgacaggctgaacggttttttaacgattcgcatgctgttagtcgggatcgccgtttccgcgggcttcagcgccgttacattgtttatgtcgctgcgcctgaatgaagaaacctatacattcgcgtcccgctggctggtcggaaacgtctggggcagggactggattcatgtgtggtcgctgctgccctggatcggcattctcgcaccgctggcttggcttaacgcccggtctttgaatattttaatgcttggtgaccaggcagccgcggggctcggcgcacacgtacagcgaaaaaggatcatgctgatcgccatagctgtcggcttatcctgcgcgagtgtcgcgatggcgggcggaatcggctttatcggctttgccgcccctcacttggcgagacggctcgtcggcaccatgcatcagcatattatcccgattgcggggttaatcggccttgtcattcttgtcgcgtcagataccatcggccggtctttgtttcagccgaacgccattccggccggggtggttgcggcagcgatcggggcgccgtattttctctatctggtcatgaaaatcaaaacataaaataaggagttttctcatgaaaaaaataattgcgctcgtcagtttcatgtgtattttcttattggctgcctgccaatccgattcaacacagccggagacaaagaagaaatccggcgatcataaaatcgcatcgatgtccattcacctgacaaatgatctgctggctctcggcgttacaccggccggttccgtcgtgggcggagaattaaaagattttctccctcatgtgaaaaatcagctgaaagacacgaaaaaactcggccctgcctcagatccggatatggaagctttactcgagctgaaccctgataacatttatcttgataaagaatttgcaggaaaagatgtgtcaaaatacaagaaaatcggaaacacacacgttttcgaccttgataaaggcacgtggcgagatcatttaaaagacatcggaaaaatcgtcaaccgtgaaaaagaagcgaaaacctttattcaaaattatgaagatgaaacaaaacaagtcagatccatgatcaataaggaattagggaaaaacgccaaagttatggcgatccgcgtgaacgcaaaagagcttcgcgtcttcagcacacgccgcccgatgggtccgattctgtttgatgatctgaagctgaagccggctgacggcattaaagaaatgaacacctcccgcccttatgaggtcatttctcaagaggttctgcctgattacaacgcagatgcgattttcgtcgtcgttaacagagacgacaagtcacagcaagcctatcaagaattgcaaaaaagtgctgtatggaaaggcctgaaggcggttaaagcaaatcatgtctataagatcgccgatcagccttggcttgattattcggcactgggaaataaattagcaatggatgaagcgaaaaagctgttccaaaaataaacatgagccggttttgcaaaagttgcaaagccggcttttttatattattgtttacttatataaccaaacgcttatataatgatttgaaaaggagtgagagcatggaaccgcagcaaaacgccttaagttccgaaggggtcagtcaatgcctcaagcttctcagcgatccgacgaggcttttgatgatgaagcttctggcggataaggaatactgtgtctgcgagctgacagccatttttgatatgagccagcccggcatcagccagcacttgcggaaattaaagaacgccgggcttgtgcgggaaaggcgggagggccagtggcggtactatgccattcatccgtccggtccggaatacacgctggtccgctcgattctgcggcagatagatgaaaaggacggcgttttacaaacactgcggctaaaagaagtcactgtttcatgccggtaaggaggatctattcttgggaatcgcggttttatcagcactgatttttgtgctgacacttgtatttgtcatatggcagccgaaacatgtatccatcggctggtctgcctgcggcggagcggtcctcgctttgatcgcgggtgcagtcagccttcatgatattgcggaagtgacggggatcgtctggaatgcgacacttgcctttatcgccattattatcatttcattgattcttgacagcatcgggttttttgaatgggctgcgctgcatatggccatggcggccaaaggcagcgggctgcggatgtttctctatgtgtcggtcttaggggcggttgtctccgccctgtttgccaatgatggagcggcgctcattttgacgccgatcgtacttgcgatggtacgggctttggatttacctgaaaagctggtttttccgtttattatcgccggaggattcatcgcggacaccacctcgcttccgctcgttgtaagcaatttggtcaatatcgtctcggcggattactttcatatcggatatattgaatatgcatcacgtatgctggtgcccaaccttttttctttatctgcaagcattttggtgctgtatctctatttcagaaaaaacattccgaaacggtatgacaccggccttgtcaaacatccgtcatctgcaattaaggatcagcgcctcttccggttatcatgggttgtgctggccgttttgctgatcggatatttcgtcagcgaactgctgtcgatacccgtttccttcgtagccggctccatcgcggtcatttttctcattctggcacagcgaagccccgccgtcccggcaaaacaagtcatcaaggacgccccatgggccatcgtgtttttttctgtcggcatgtatgttgtcgtgtacggcttgcggaatgccggactgacggatcttctttctcagcttatacagaaagcggcggatcacgggctgtttgcggggacactcggaatgggttttattgctgcaatcctgtcatccgttatgaataatctgccgacagtaatgattgacgccatagctatcagcggaacggacactcacgggctgatgaaagaagcgctgatttatgcgaatgttatcggttcggatctcggaccgaaaatcacgccgatcgggtcgctggcgacattgttatggctccatgtgctgagccggaaaaacgtgaaaatttcctggggaatgtatttcaaaacaggtctgatattaaccattccgacgttatttatcacgctgaccggactttatttgtggctgttatggctctcctgataggaaaaaaccttttaagttgaatcttaaaaggtttttttgtgtcaaaaatccgaaaagtaaaacttttatattttaaaagtatagacatttaaattgaaaagattataatattcatgaaaacgttttaactttatgaaagaagggatttatcatgaaaagaattttattagcctgcagctcaggcatgtccaccagcctgcttgtcacgaaaatgcaggattacgcccgctccatcggtgaggaagccgagatttgggcagtcggacaggataaagcaaaagaagcgatgaaagacgcagacgtcgtgctgatcggccctcagatgagctttttaaaaggtgagcttcaaaaagaggcggagccgcttcacatcaccgttgatgtgattgatatgatggcatacggcatgggagacggcaaaaaagcatatgaacaggccgttgtcttgatagagaacaggtaaaggaggcgataagcatggaaacatacacagatgaacagatcagttttcagctgattcttcacagcggcaatgcccgcagctgtattattcaatcgatacgagcttataaagacggccggatagacgagtcagacacctttctgacaaaggctgaagaagagctgggaaaagcgcatgacatccattttcagatgattcaaaaagaagccagcggcgccaaaacggatgtctctctgcttttcatgcatgcagaagatcacttaatgtcagcgctctcaatgaaagagatcgtcaaagaaatgctcgacttatttcaatcaaagaatttataaaaagccgggggtgaagacgtgtttgagaaaatcagccaattccttgttccgatcgcgggcaaattaaacaataaccgctacttgcaagtcttacgggatgcttttatgctggcgtttccgctgaccattttcggttcagtgttcgtcgtgctgacgaacctgccgtttttaaacaaaatcatgagcagttccgccctgtctgtctttcaatccgggtttggcggggcttcaacggcgacgatggggattatgtccatttttgtcgtcttcgggatcggctattacctttccaaaagctacgatgtggaggccgtattcggcggagcgatcgctttggtttcttttctgctgctcactccttttgtattagagccggaaacgggcaaagcggttgcaggcgtcattccggttgaccgtcttggagcaaaagggatgtttctcggcatgattaccgcgtttttgtcaggtgaaatctacagaagaatcgtccagagaaacttgacgattaagatgcctgccggtgttcccccggctgttgctaaatcgttcgccgcattgattccggcttttatcacgcttaccgttttcctcttgatcaatgcggctgtcacccagatctttcacaccaatctgcatgatgtcatttatcacacggttcaagccccgcttgtcggacttggaagcggcatcattcctacattaatcgctgttttctttattcagattttatggtttttcggtcttcacggacaaatcatcatcaactccgtgatggacccgatctggaatacattacaggtcgagaatttagctgcctatacagcggggaaagaggttccccacattatttctaaaccgtttatggagatttacaccgtcggaatgggcggcaccggaatgacattggccatagtgatcgccatcttgctttttatgaaaagcaaacagatgaaacagatatccaaactcggtctcgcgccaggcatttttaacgtcaatgagccggttattttcggtttgccgatcgtaatgaacccgatcattatcattccgtgggtgatcgcaccgatggctgtcacgcttgtcacctacctggccatgtcggcggggctcgtgccccctcctaccggcgtgaccgtaccttggaccgtcccccttttcattaacgggattatggcgaccaattccgtcatgggcggcattatgcagctggtcaacctctgcattgtctttgtcatctggttcccgtttcttaaagcgctggacaaattaaacatggcaaaggaaaaagaagccgaagctcagcagcaagtccgcgatgacagcgtgagtatgtaataaaaatcgcagtaagggagagaaatcaattgactgaatcagttgttcaataccgttttccggaaggattttggtgggggtcttccgcctccgcaacccaaaccgagggagccgccgacagagacggaaaaagccagaacatatgggattactggtatgaaagagagccaagccgtttttttaacggagtcggccccggcgacacgtcacgtttttacgacaaatacaaagaagatatccggctgatgaaagaaatcggccacaactctttccggctgtctatttcctggtcaagactgattccggacggaacgggtgagatcaatcagaaggcggccgcgttttaccagaacgtcatcgatgaaatgctcgcccatcacattgagccgtttgtcaatttgtttcattttgacatgccgctcgcccttcagcgttcagggggctgggtcagccggaacaccgttgacgcgtttgagcattacgccaaaacctgcttttcgttattcggcggcaaggtaaaaaaatggttcactcacaatgagccgattgtgccgattgaaggcggctatttatatgattttcactatccgaatcacgttaattttcaagaagcagtgcaggcaggtttccacaccctgctgtcaaatgcaagagctgttaaagcctacagagaattaaagcaggacgggcaaatcggaatcattctgaatctgacgccttcttatccgagaagctctcatcctgaagacctgaaagcggcccggattgccgacgccttttttaaccgatcatttttagatccagcagtaaagggcgaatttcctagtgagcttgttgagattctcaaagcggaaggatttctgccgcgttatgagaaggatgatctccgcctcattcaggagcatacgatcgatctgctaggcgtgaactactatcagccgagacgcgtcaaagcaaaagaacatgttccgaatccgcatgcccctttcctgcctgagcgtttcttcgatccgtatgtcatgcccggccggaaaatgaaccctcatcgcgggtgggaaatttacgaaaaaggaatctatgacattctcaccaacctcagagaacattacggcaatatcgagtgttttatttctgaaaacggcatgggagttgaaggcgaggaacgcttccgcgatgaagacggcatcattcaggatgattacaggattgaatttattaaagaacatctcaaatgggtgcaccgggccatcggggaaggttcaaatgtaaaaggctatcatctgtggactttcatggacaactggtcttggacaaatgcttataaaaaccgctacggctttgtatctgtcaatctggaaaacgggggcggacggaccgtcaaaaaaagcggacgctggttcaaatccgtttccgatcaaaacggcttttaacggaggaggagctacagccatgcttggaggtattgaagccggcggcacgaaatttgtctgtgccgccggacaaaaagacggcaccattctggacagaatcgagtttccgacgggagaaccggatgaaaccctcagacaggtcatccgttattttaaagatttcccgatagaagccattggcatcgggtcgttcgggccgattgatatccgtcccgacagtcaaacttacgggtgcattaccgcgacgccgaagacagcctggcggaactgcccttttctccaaacgatcaaaaacgctctgcaaattcccgcaggcttcaccaccgacgtcaatgcggcggcgctcggagaagcttctttcggcgcggccaaaaacgcggacagctgcctctatttgacggtcggcacgggcatcggcgcgggcgccatcatgaacggcagatttgttcaagggctgtcacaccctgaaatgggccatatttacgtcagaagacatccggacgacggctacaaaggcaattgcccttaccatacagattgtctggaaggtctcgcggcaggccccgccattgagaaacgctgggggaaaaaagcatatctgctgacggatctcaaagaggtatgggagcttgagggctattatatcgctgaagcgcttgtgcagtatatcctcattctttctcccgaaaaaatcattctcggcgggggcgtcatgaagcagcggcagttgttctcttatatccgtcagcacgtaaaaaagcggctgaatcaatatattgatctgcccgatattgaaaactgcattgttccccctcaattgggcattcactccggcgcggccggttcgctcgtattggcggagcaggccttagaggcggcaaaccgggaggcgggaaaatgacgaagctcttatttttagaaccggtttttaaagaaagattatggggcgggacgaagctgcgcgatacattcgggtatgagattccttctgaacggacgggagagtgctgggcgatttcagctcatccgcacggtgcatccatcgtgcggaacggacctttttccggaacatcattacaccgtctctggaatgaacatcctgaactgttcggacatccgaaagaagacgctttccccctgctcacaaagattcttgatgctgatatggacttatccgtacaggtgcacccgaatgacgcatatgcgcatcggcatgaaaacggagaactcggaaaaacggaattctggtatgtcttggactgccaaaaagacgcggagctcattttagggcaccgcgcccaaacaaaagaagatttcgttcggctcattgaacgaaacgagtgggatcatctgctccgccgcatcccaattaagcccggcgactttttctatgtcccgagcggcacgctgcacgctttatgtgaaggtacgctcgttcttgaaatccagcaaagctctgatgccacctaccggctttacgactatgaccgtaccgatgagaacgggaataaacgcgagcttcaccttcagaaagcaattgacgtaacagacataccgcataccgatcaaaatgtaaaaagcacaaagcatcagatcggagatgctcttattacgatactcgctgaaacacctttcttttcaatttataaatggaacgtgagcgggaaagcatcattccccgcacccggccggtatttactcgcaagcgtcattaaaggacgcggaaaactggatggatgctccattcagaaaggcgggcactttattgtgccggcggatttcggagattttgttatagaaggagattgtgaggttatcgtttcacatccttcatcatcttaaaaaatcaggaggtcttttttatgctcaaaaagttcgcagtctgtctgtctatcattttattactcatctcagccgcccgtccgatatcggctcacaccgtttaccctgtcaatcccaatgcccagcagacgacaaaagacgtcatgaactggctggcgcatttgcccaaccgttcagaaaacagggtcatgtccggtgcattcggcgggtacagcgatgtcaccttttcaatgacggaggaaaaccgcttgaaaaacgcgacgggacagtctcccgccatctacggctgtgattatgggagagggtggctggaaacatcggatatcaccgattctatcgactacagctgcaacagcagcctcatttcgtactggaaaagcggcggcctccctcaggtcagcctgcatctcgcaaatccggcctttccatcaggacactataaaacggccatttcaaacagccagtataaaaatatcctgaacccttcaactgttgaaggacggcggcttgaggccttgctcagcaaaatcgccgacggccttactcagctgaaaaatcaaggcgtcaccgttctgttcaggccgctgcatgagatgaacggtgaatggttctggtgggggctgacaggctacaaccaaaaagacactgagagaatctcgctgtacaaagagctttacaagaagatataccgctatatgacagagacaagaggattggataatcttttgtgggtgtattcgcctgatgccaacagagacttcaaaacagacttctacccaggctcatcttatgtggatattaccggactggatgcttacttcaccgacccgtatgcgatatcaggctatgatgaaatgctgtctctgaaaaaaccgtttgcctttgccgagaccggtccgtccggtaatatcggaagctttgattacgctgtttttatcaatgcgatcaggcaaaagtatcccgagacaacctactttttgacatgggatgaacaattaagcccggcagccaatcaaggcgcgcaaagcctttatcaaaacagctggacgctgaacaagggcgaaatgtggaatggcggaaccttgacgccgatcgcggaataaccgcttcttttggaaaaccggttttaaaaaacggctctgctgggcatattgttaccgtttaaaaaggagggttcaacaatggaaaataacaataacagcgatgagacgctttccagtaagacgaccggtaaaggcgagtcagaagacacgctgacaaaccggcagggccatccggtcactgacaatcagaatgtcaggacagtcggcaacagagggccgacaacattggagaattatgattttttggagaaaatcagccactttgaccgcgaacggattccggagcgcgtcgttcacgcgcgaggcgccggcgcacacggatacttcgaggcatacggaagttttggagacgaggagatttcgaaatacacaagagcgaaggtgttccaaaagaaaggaacgaagacaccggcgtttgtgcgtttttcaactgtcaatcacggaaaacattcgccggaaacactgcgtgacccgcgggggtttgccgttaagctttatacggaagacggcaactgggatctggtcggcaataacctgaaaatcttttttatccgtgatccgctgaagtttccggatcttgttcacgcatttcagcctgatcccgttacgaacattcaggacggcgagcgaatattcgattttatttcccaatcaccggaagcgactcatatgatcacgttcttgttctcaccgtggggaatcccggccaactaccggcagatgcagggctcaggggttcacgcgtacagatgggtcaatgaagaaggaaaagccgtgctcgtcaaatatcactttgaaccgaaacagggcatccgcaacctgacacagaaggaagcggaagagattcaggggaaaaacttcaaccatgcgacacaggatttgtatgaagcgattgaaaaaggcgattaccctgaatgggaagtgtatgcgcaaatcatgactgatgacgagcatcccgagctggattttgatccgcttgacccgaccaagctgtggtataaagacgatttcccttggaagccgatcggtaaattggttctgaacaaaaacccggaaaactaccacgccgaggtggaacaagcatcattcggaacgggcgtgctcgtggacggccttgatttttcagatgataaattgcttcaggggcgtacattcgcctattcagatacccagcggtaccgcgtcggcgcaaattacctgcagcttccgatcaactcgccgaaaaagcatgtcgccaccaaccaggaaggcggacaaatgcagtatcgggtcgatcgggcagaaggacaaaacccgcacgtcaactatgagccgtccattatgggcggactgaaagaagcgaagcaggatgggaaagaccatacgcctcatgtcgaaggcgacgtgaagcgggaagcgatcgaccggacgaataacttcggtcaggccggagaaacgtaccgccgattttcggaatttgaacggaacgaattgattacaaacttggtcaatacgctgtcttcttgccgaaaagaaattcaggatcaaatgatcgagaacttcacaaaagcagatccggactacggaaaacgcgttgcggaaggactgaaaaaagcctctgaaaacaacagcggcgggccgatcggcacaacggatacggcacaggccgcaaagcaggctgaacaggaaagccatccgtcagatccgtattaaacaaaaaaacaggacagcagcgtcctgttttttttgttgagctaattgagctcctgtatattctgctccgccacagccgcaaatactttcggctccggacggtcaagatcttcatggaataaactcactttatgaatctgccggttgtcgtacagatgaaagtaatagtttcccgtgtcacagcacatgaccgacgtatactgcgtataatcaatttcattctcctcggtgatcaccgcgccttttggaatattcacattggacagcacgtgaaaagctgccgtgaccccttccgtttcatgagctgctggctccaaatgctctttcagataagcggctctgatgaatcgggatggcggcgtgtaatcaccgggaagcccgatcgttcctgagccttgcccgaatgcggttaatgtcattccgcccaatgtcttgctttctgactgctgcggcctgattccgatataatggcgcagattggtcacatgccaaggaaattcagggctgttggtcatcaccccgggtttgttgtcatagactttcattccttccggtgtcggctcgatcacaatgcagccgcccgtacggtctgataaaatccaatgaagaggcaggaccgtatccaataacattaatttcttctctacaatcgtcagggaaccaagcttttcctttacatcttcaagagatccacagtttgataaggtccatgtgacaaactcatgaggagcgatgtgagaggtgccctcccgttccgctttctcgtatcccgcaaagcccggaaaatacagcgtcgcacacgacagtcccttttcattcacgccgtcggcaaacagaatattgccgagatttctccccatgccgataaatgcgtatttcgtcttatgcagcctgccgtcagcttcacttctccagctgtactgacgagggtaaagcatgacgtccgtgccgagctgaaaagcaaaatccatcgttcgcgccaataagtggttaccgtctgctgttttcaatgtaagacttgtacacatatcatcaatccccttttcaataatgaaatttacacaaagtaaactattcttccagcttaacgaataatgattccattcgtcaaagaattgacacatttctctttgatacatattagcttttaaacctatccataccttttaacccctaccaaaatcgtttttgcggtatcagtttggtttttcaaaaaaactttactggaatttgtaaacggcaagtcattctgttaagctatgactttatgttaaagaagaacatacggaggagattatctattgaaagtagaaaggcgaacgattgaacatattccgcatcacgaaagacacggaaaggccagagatttgtttcccgtttggttcggggcgaatatgcatatcacgacgttagtcaccggcacactgcccgttacaatgggactcgatctcttttggagtatcgccgccattattatcggaacctttatcggcgcaatttttatggcgtctcattccgcacaaggtcctcagctcggcattccgcaaatgattcaaagccgcgcgcaattcggcgtgatcggagcgattctgcccctctttttggtcatgtttatttatcttggtttctttgcgagcagtacgattctcgcagccggcacactgagcagctttgtcccgattccggcttcatggtgtattatcggcttaagcgccatctgttttttactcacgatttacggtcatgatctgattcacaaaatgcagaaaatcctctcttggacctcctttgccgttttttttgcagcaacgattcttatttttcaactgccgattccctcaggaagctgggtgcccggctcattagatctgcctgttttcttagtggcggtcagcgcggtggcgacatggcagctggcatacgcgccatatgtggcggattactcccgctatctgccggtcaaaacaccggcatcgcatactttctggtacagctatgcaggcacatcagtcagttccatctggatgatgcttctcggcgccattttgacgacggcgctcccggaatttaccgctaatgcaggaaatgagattgtccgattgttcggcccgttttcctttattatgctaatcatcgtcttgttcgggcaaatggcgatcaacgtctttaatttatacggagcctttatgtcaaccacgaccaccttggagccgtttttgaaactgaaggtgacgccgaaaacaagagtggtgatgatcctttgtgtcacggcagcgggtactgtgttaagtctcttgggccaaagcaacttcatggaactgtttttaaatttcatctttttcatcagttatttcttaattccatggacggcgatcaacctcgtggattactattttatccgccgcggaaaataccacgtcaaatcgatgtttgacgtaaacggacaatacggcaggatcaactggattacagcggccgccttcgttttgtcgattatattagaaatcccgttcatcaatacatccttttacatcggaccgctcgcagaaatattcggcggaggcgacattgcctggattgtcggcctggccgtgccgtcgctgctgtattatttcctgatgaaatcaaggttgaaacataaagaggcgccttccatataaagacgcctcttctttattcatactgtttccacacccgcggcagcagttcagaaagttcgtgcgccaataaggtatgggcggagcgctctttcgtccataattccgcacaggcgccgtgaagacggacggcgttcaatacggcatgcttcggttcttgatggcagcacagcatgccgaggatcattcccgtcagcgtgtcgccggtcccgccttttgcaagcgcgccgtttccggttgtattcctgcggcactccccatcgggaaaagcgataatggtttcgtttcctttcaggacaatcgtgacacgaagccgctccgcccactccgcggcatatgcggctctgttctgctgaatctcctgaatcggaaggcctgtcattctggaaaattcgccgggatgaggcgtcaagatcaccggggcttccctctttggataggttcttttcgtaatggcgcccgcatccagtatgacgggataatcggcagaaagcagctgatcagccgcctgctgcacttcatccgtttgcgggagtcccggcccgatggccgcagcccggatgttctcttcaggctggccgtccgcggcttttttccagccgtcacgccagtatgtcgcttccagcagcaccgggacgatgagcgggatgacgcctgccgacgtaccgatgacaagcttgccgacaccgcttctcatcgcgcccaatccggccagaagggcggctcccggcatatcttcgctcccagccagcaataacgccctcccgaacgttcctttatggctgtctgcgtcccgtttcggcagtgtgtctttcacatcctgctccgtccaatcaagtatgttcatctctgtacctcctcgtctgtctcctatttatattccaaatcaggagcaattttaaaccgcacaaaaaaaacagccgctcgtttgcggctgtttatgttctgatcggaacgtcaagacggtaaagcttccggtaccgttcgttttctgcaagcagctcttgatgggttccttccatttctgcttttccattttctaaaaagacgattttatcagctgtttccacacctgctaagtggtgtgtgatccagagaatcgttttctctttaaagacgtcaaaaatggtctcaagcaagtcacgttcggtgaccgcatcaaggccgaccgtcggttcatcaaggataatgaccggcgtatcctggagcagaatacgggcaagcgcgatccgctgccgttccccgccggagaaacgaatccccgtctcctgcacggacgtttcatacccgtcaggcagtgattcaatataatcatgcagcttcacttgccgcgccgcacgcctgacatcttcatcgctcgccttgccgtttccgagacggatattgttcataatgctcgtattaaagagatgaggcttctgattcaaaacggctaccgctgaggaaatctgatcctgcacggccgcagtttccagcccgttcagcgtcactttgcccgaatcgggaactaaggcgccctcaattaaagcgagagaagtcgacttacctgagccgcttctgccgagtagcgccattttttcaccttggcggagagtgaaggaaaaatggtcaagcacatgactgtgctgatcataagaaaatgtcacgttatcaaatgtcagtgtcacatcagatacatccagtttctcatctgactgcttcacctcacgcccccgcagctccggagccgccttactcattctgctgatggaatcctgataagaaggcacttccgtcagcgcatccgaaaggggcagaaaagcctccgtcagcggaaatacgacgagcacaaaggctgcgatcatcgtgttggcgatgctgccgtccgcatactggcccgccgtccagaacagcatgatcaatatgaaaccgccgacaagacattgcgcggcgaggtcacgcagcctcgtaaagcgctgacgtttgctctcaaggtcaaaccatgccttttctttctcttcataagaggaaataaaggcggcctgacgtccagaaaacatccagtcgctcacgccgagcacggcatctgtcagccggctgtagagcgtattccggccgcttttcagcctcatgtttttcgctctcgtcactagaagcgatacaaccggaaataatacaaccaatacaaacaggtaaatcgccgcaaaagcggcaaacggccaggaaaagaagccgagcccgataacggatgccgcatacagcagcaaagcggaaaccgccgggaaaatcgtttttaaaaacgcatcctgcaaatgctcaatatcctcagccaaaatgccgagcatatcgcccgtcctaaaacgggaggaaagcatgagcgaggccggctccagcatattgtaaagccgcacccgcatgtcggacacgattttcaaaatgatatggtgccccgtcagacgctcagcatatcgggagactgaacgggcaatcccgaaggtgcgcacggccacaatcggaacgtacacgagcaggatattctcaggccttgtcgccgactttgagatcaaaaaaccggaagtgaacatgagaaaggccgccgaaaaaatcgtcaccgcgcctaaaaaaatcacaagaacaaacaaacgggcattttgcttaatatacggcagaatccattcttctttcctcatgttctttcccccagttgcgcctttacaagtttggcgtatacgccttgttttgccatcaattcgtcatgggtgccgatttccgctaccgcgccgtgatcaagcacgataatttcgtccatctcaagcatccagtgaagacggtgagtggccagaaagacaagcttgttttcaaacaggtctttcatcgtttcttttatttcatattctgtttcaatatcaaggtgagcggtcggctcatccaaaaggagaatcggccggttccctaagaaggctctggccagcgcgacacgctgagcctgccctccgctgagcgcccgtccgccctcgccgatccggccgtcaagaccgccgggcagattacgaatcaggtcggaaagacccgccgaagcggcggcgcgcgccgtttcctcatgggaagcatcaggatgataaaaccggatattattcaaaagcgtgtcatcaaaaatatacggatgctgcggaatataaagcagctgcttctgccagctgtccgactgcagatgtgagcgggattcaccgttgaccttaatctcaccggacgcaggctctaaaaagccgcccagcacatcaataagtgtcgattttcccgccccgctttcaccgataatcccgattttcttcttccctttaaaggacagattaaattcagacatcgattcacggacgttcaaacgcgtaagctgtaattcgtccccgtcagtccacgtatcaagttcgagcggcttttcttctttaaaaccgggctgcgccaaaatcgcttgaatcgtttttcccgcctcctgcccgtttaatgtcgcgtggtagtcatttcccacctcgcggaccgggagaaaatattcaggggcgagaatcagcgcggtcaatgccggaccgagaagaatatgcccgtctatcagccgtaagccgagaaacaccgcaactgtcgccaccgacagcatcgtaaagaaatcaagggcgaatgatgataaaaacgcgacccggagcgtgctcatcgtcgccttacggtatctctcactgacatgaaagatatttttgctgtgtgatttgcttaatcctaaaaaccgcaatgtctccagtccgcggagcgaatccacgaaatgattggaaagcgtctgataggacttccattggcgatcggcttttttctgcgcgacaagcccgagcagaatcataaatacaatcaaaatcggaagcgccagaatcaaaatcaaagccgatgttttatcctgaaaaaacacgtaaatgacaacggctgccggcacaatcgccatgctgaccattttcggcagaaacagctctaaatagcggcggaattggctgatgccttccatcgccagcgttaccatccggcccgtcccctcttttttcgcaaagcgggggccgagacggaacaattgctcaagaaatctttttcttaagtccgcgccggtttgagcggcatattggtacacgattttctgccgaaccgctgtcaccgcatgccggaccaaaaacgcaagcaggaaaaagccgataaccggataaagagaagcaatccgcttcccgttaaacaatccggttaccgcctggttcagccattccgcctgcaagataatggcggccgtttgtattatcgttaatcccgtaatgatcgcaagaatccgcttcattcctttataaagaaacaggtcttttcccattaataagtcataggctccttatggctgacgcgtttccggaagacgtagtagctccagatctgactgccgatgacaaacggcagcaaagtcagtgcggcaattgtcatgaccttaagtgaataatcaccggaagacgcgttagctactgttaagtcatacgcgcttttcagcgagctgaccatgacgcgcgggaacaatgagatgaaaatcatcgcgactgtcaacgcaagtcccgcaccggtcataccgaatgcccagccgtcttttttcttgctcataaacagaacggcaagcaagttgcagatgacaatcagcacgaacacggggatcgtgatgtttgcccggcgtgtaaacatatccgtgtcgtatgcagacatcgcaaagaaagcaagtacaacaagaaagataacaccaattacgcgttttgccatttttctcgcacgctcctgtaaatcaccgatcgtgcgcagtgtaacaaacattaaaccgtgcaggaatgaaagaagggtgaccgcggctccgccaagaacggaatacacgttcacaatatctgaaaatccagcatgcatattcatatggccgtcaatcggcatgccgcggaacatgcttgtgaaaataaggccgaatacaaacggcgggataaggctgccgaagaaaaccacccagtcccatgttttgacccatttcaaattattcactttcccgcggaattcaaatgccacaccgcggcccatcaaggcaagaaggatgatgataaacggaatgtaatatccgctcagcatcgtcgcataccagttcgggaatgccgcgaaaatcgctcccgtccctgtcagcagccatacctcgttcgcatcccagaacgggccgatggtgttaatcagcactctgcgttctaattcattatggccaagaaatcgggtcgaaatgccgacaccgaaatcaaaaccttctaaaaagaaaaatccgacaaacaaaaccgaaacgagtataaaccaaagatcatgaagtgaccccatggtagacctcctgactgaacggatccgttgatacaggaacatccttgtgatcatcatggtccgcaccttttttaatttcacgaacgaataggaagacaagcagtgtgcctaaaatcaagtacatgacgccgaagccgataattgaaaacagcagagatcccgtcgttacgttaggcgaaacggattgtgcggtcgtcatttgccccatgaccgtccacggctggcggccgatttcagtcataatccatccggcagagttcgcaatgaatgggaatgcgatcagcgcgaccataccgcgtaagtaccacttgctcgtatgaagctttttgcggcggttcagaataaaaccggcaattgcggcaaaaatcataagcgcgcccgctcccgccataatgcggaaactccagaacgtcgttttaacaggcgggatatagtcgccttttccgtacgttttttcgtattctttttgaagtgttttcatccctttaacactgccgctgaacttctgataagccaagtagctcagtgcgtaaggaattgaaatttcagatgtgtttttttctttattcgtatcaatgttcgcaaaagccgtccacgcagcaggatcaccgctgtcatcccaaagcgcttcactggcagccattttcatcggctgcgattccattaaatgctcagcctgcatatgtccgctgaacgcaacgccgataccggcgatcagcccgacaatcatcgaaagcttgaacgatttatggaagaacggcacttcttttttcttcaataatttaaatgcgctgacaccggcgataaagaaagcacccgttgcaagcgctccgaaaatgacgtgaggaaattcaacccaaagctgagggtttgttaaaagcgccccgaaatcactcatttccgcgcggccgtttttaatcgtaaagccgaccggctcctgcatgaatgagtttgccgtcaaaatccagaaagatgacataatcgttccgaaggatacaagccaaatgcaaagcaaatgcacttttttagataaacggtcccaaccgaaaatccataatccgataaaaatagactccataaaaaacgccaaaagcgcttcaaccgcaagcggagctccaaatacgtctccaacgaagcgggaataatcagaccagttcaaaccgaactgaaattcctgaagaatccctgtgacgacgccgacagcgaagttaattaaaaagagatgtccccaaaatttagccattttgagataggtctcttgttttttgacaacataaagcgtctccatcaaagcaaccataaacacaagcccgatagacataggcacaaacaagaagtgaaacaatgttgtagatgcaaattgaatgcgggctaaaaccaactcactcatgatgtttttcctccaatctggtaaattgctcaacatttcacaaacacgacaagatccttgctcgctatttcacaaagaatgatatatttgctcaatttttcacaaatttgtcaaaactaatgaattatcagcctgtacaccctggggtcagcggctgtcatagaaatgattcaatatcattactttacaacgattcggcctaaaaaaaaagatcaatatacctaaaaataggctgaaattgtgaccgattattgtcgaatttatagagaatttatgtcagcatctaggatatttgtccctttgatatcgtacctcttttttattcgtgtggcgaacaaaatgctttatgcagtgaaaaagcccgtcagatcgcctttttgagaaagaaaacgaagaaaaagtatatcttctagtaaattcataatatatgaacaatttaaattttttagtatactttaaatggggatatttttcactacataacgactgggggaacaagcatgggagaacttcaaccaaatttgcaaacggaatcattccaaaaacaggaacggactgataactggtttgccagagcaatgaatataagaatcggcattattccacttcctatctatatcctgctgttcttgcttattacggtgtttgtcatgagccgcgatgtaaaaagcgacatcctgacatcgattgccgtcatgagttttttcggatttaccttcggccagatcggaaaatccattccgatcgtgcgttccatcggcggccctgcgatcctcgcaacctttattccgtccgctgtcgtctactaccacctgcttccgaaagacattatcacttcaacaacagaattcacggaaagctctaactttctctatctatttattgccggtatcgtcgtcggcagtattctcgggatgaaaagagagacgctcgttaaggctttcgtcaagatttttattccgcttatcgccggctcgatcgcagccgccatcgtcggcttatgcgtcgggaccctgctcggcctcggctttcagcacacgctgctttatattgtcgtcccgattatggctggaggtgtcggtgaaggcgcgattcctttatccatcggctactccgatattatgccgatgtcccagggggaagcctttgcgcttgtgctgccgtccatcatgctcggaagcctttgcgccattatgttatcgggcctgctgaatgtcatcggtaaaagcaaaccggaatggacgggcaacgggaaggttgataagtctgatcagaacgctccggcattggaacagccggccaatgacaaaacgtttgatttgtcctttttcgcttccggaggcattttagctgtttctttatatttggtcggcatgctggcgcatgatttctttcagcttccggctcctgtcgtgatgctcgtccttgccgtgcttattaagctgttcaggctggcgccggcctcgattgaaaacggagccttcggcgtctcgcgttttttctcgacagccgtgacctatccgctcctatttgcgatcggcgtttcaatgacaccatgggacaagctcattgcagcgtttactatcagcaacatcattaccattttatcaatcgtcgtcacgatgatggccgtcggtttcctgacaggaaaatggctgaacctgtacccgattgagacggcgattattaacgcctgccattccggacagggcggcaccggcgatgtcgcgatcttaagcgccgccgaacggcttgagcttatgccgtttgcccaagtgtccaccagaatcggcggggcgattaccgtgagcgtcacccttctattgcttcatcaattctattaaacggaaaaaagcctccgccatatgcggaggctctgttagttcatcacattttgaatataagagccgaatgccgcgccggacataccaggcgacacacgtacacggtgaagcccgtaaaggccctgatctcttgatgccgcacccggttccgtcgtgaccgccatacggtagcctgatgcagcggcggcttttaatgtttccttattataccgtccgacaggatagctgagcacagacgtccgctgcccgaacattcgatcaaataaatgcttggagtccgccatttcacggcgctgctgttccggtgtgagtccgttcaactcaagatggttcatcgtatggctttgaatggaaatgccgtgtgcggccatctccttcatctgcttctcagtcagatgatttctatgtccgataaaatttccgatcataaagatagtcgctttcattttatatttctttaaaatcggatacgcctcttttacattgtcggtatagccgtcatcaaatgtgatcagaacgcatttttcacgcggctctctatcctccgtcaacatcagataggcttcttccggagtcatcgtataatagccgtgatcatgaagccatttcatatgctgccggaattcttccttcggcacacgcaggctgttcccctcagaaatgctgtggtacatcagaatcggcagtctcgccgttcctttcgttttaacccatgccgacgtatccggctctttttttatttgcggatgtacggactttttttcgtggtgctcttccgccttcggaatactctgttcggtacttgcctcatgccccgagcaggcggcaagcgtaaacacggcagccaaaaggcacatgcacatgatgatgcgtttcatggttttcctgctttctgtcttatatttactttttatatcggttatgctgataaaattgttacatcaaaaaagccggacatccagctgtccggctttgtgttatgagcggattctgatttctgtttcactgtcaaagaagtgggctttattcatgtcgaaagcgacagtcaattcctcaccggcgtgaatgtcatggcgggcgtcaatcctggcgatgaaatcctgatccccgatccgggaataaaccataatttctgacccaagcaattccgcgacattgattttagctgtgatggatgaattcttataggattctaccacaatcagctcgtcatggatgtcttccggacggattccgaagatgacatctttgccggcatagcctttttcccggagcattttcatttttccctccggcacgctgagagcggctgaaccgatctgaatggcgccgtctgtcagccttcctttaaaaaagttcatcgcgggggagccgataaaccctccgacaaatacgttttccggatgttcatagacttctttcggtgtgccgatctgctgaatctttccgtccttcatgaccacaatgcgtgtcgccatcgtcagcgcttcggtttggtcgtgcgtcacatagattgtggttgtttgcagcctttgatggagcttaataatttcagccctcatctgtacccgaagctttgcgtccagatttgacagcggctcatccatcaggaatactttggcgtccctgacaatcgcccgtcccaaagcaacccgctgccgctgtccgccggagagcgccttcggcttgcggtgcagatactctgtgagccccagcattttcgctgcttcttcgacccgttttttaatctccggtttcggcatttttctcagcttcagaccaaaagcaatattatcatagactgtcatatgcggatataacgcatagttttgaaacaccatggcgatatccctgtctttaggagcgatgtcattcactctcgtatcaccgatgtaaaaattgcctttcgtgatgtcctccagcccggcaaccatccgcagtgttgtcgactttccgcaccccgacggaccgacaaacacgataaactctttatctttaatatgaaggttaaaatcatcgacagccgcttctttttgatcgtaatacttataaatatgctccagccgaagttccgccatgtcatatcccccttttcttgaaaacgctttcttaaataggattgtaacagcgcacggcggcggcgtgtatgggcaatgtacataaaaaaagtccgctgccttcgtgcatatttcccatttaatgtgacttttcatactgcaggcaaataaaataagccagcagagcgccccgatatgttttaatatcaatccccgagcgttccgcaaatttatcaatccgatattgaagactgttgcggtgcaaatgcagttttttcgatgtgagcgacatgttcgagttatgttcaataaaagcctgaatcgtatgcttcagctccggttctttctgaaacagcaacgccgcctcttcctgaagcaatgcggaaagcttttccctgctttcttccgtgagcattgccggaaataccgtttccgcggtcatcgtgctcagctgcgggagatggcgcctgccattctgaaaatattgctgttctctccgataatgatggcgcagacgttctccggcgccgtaataccttccgatgaaaaaacggacactgaaataaaaatcggcttcaagaacctttacaaaagatgcgatatcatcctgatcaggcgcttcaagcttttcttcctctacaatcacgccctgatcccttcccgtccggacaactgtatacggaaccggccagaaatggcgaagcgcttccgtaaatgccccccaatccctttctcctaataaatcataatggataaaacggatacgaggctccttgacttcaggcaccaggccctcttccagcagaaaacgccgccacctctttgccgccgctgtctccgggaaaaaaacgcccttctcttcagcgggtgtcaaaaacgaattcagaagcagtttctccttctgggtgatatcctccttcggaatggcgacatagacccgcctcttctcatcataaaaacaaaagacatcctccgccgtacagcacgtatcagacaacacagccctcgggtaaattgccaatatcgggttcatatgcgctcctctctatcgctctatcatattttcagtataaaacgtccggcggattgtatccactgagttttacgaaacagctttccggctatttcccgggaaacgaatcataaacgcttctgccggatatgaaaaaaccctctgcaccagcagagggatcttttttatttagagatatcgacgaagccttctccaaacacgtcacgcacatcatgaacaatgacaaacgcctttgtatcacagcttttaataattttcttgagcatggagagctcttgcttctggatgacgatatataaaatttcttttgactgccctgtgtaatttcctttacccgacagcagcgtcacccctctgtccataagcgtgttgacctgttcagcgatttcgtgcttatgctcagatataatcgtcaccgcttttttcgtattcagaccttcaatgataaagtccatcaccttcgttccgatgtaaagcatgacaatggtaaacatcattttttccgcgccgatgatgaaataagaactgaagacgacaatcagatcaaagaacaaaagcgcgtagctgatattccaatcgagatatttattcgcaatcctcgccaaaatggcagatcccgcagtcgtgcctccgactcgaataatgatcccgattccgacaccggcaaacacacccgcaaaaatagtattaataatgagttcatgtgacggcgagtgccaatcatgcgtcagatgcagaaacagtgagttggcgacaacggtaatgatcgtataaagcgttgtttttccgtctaaaaatttatatccgatgatcaataaaattccgttcaaaatgatattcgtcacccctggcgaccattcaaacacatagtacaagatcaaggtaatccccgttaccccgccctctccaagatcattcggaatggcgaataaattaacagccaatgcaaagataaaagccccaatgatcagcatcagcacatccagcaatctttttttcatcccagacactccctttttataaaatcaaaaaagcccggggagagcactcttcatcaaaagagcagaaactcccgggcttttatcccaccgtgtcacagcaaaaacctgctgtgtgttttctctcggtccagaccaattcagcattgcggaaccctagaaaaccactgttttttatgttcagtttttgtatttctttcaagattatacgggaaatcacgagcatgttcaacctctcttttttattaaacttatgaaaaatttgaccgttctgccgatactaaaaaaggacctaaaaatacatgactaaaaaatcattaaaatactgtttttctcaaaatagaattgactgaaggttattttacaggcattatagtatatagttttcaagaaatagtttacataggaggaaatattatggcaggcaacttagtgtcttgtaaggcatgcggcaaagaaatcgctaaaggcgttaaaaaatgtccaaactgcggtaaagatcagcgaaacttttttatgaggcataaaatcattacatttattttggcagtggtggttattatcattctcgcaaacatcggcggcggaggcgggtcttcatcatctaaaactgcgtcttcaaaagctgcggaatccaaggaaaagctgtataacatcggtgacactgttaaaactgaaaaaactgaagtgactcttacaaaagtagaaaaaagagactcagtagggacacaatatatcgagaaaaaagcatctgacggcggcgttatcgtagctgtacaatatacagttaaaaatgtgtcaaacaagccgttaagctctttctccattccgagcgtgaaattagtagattctaaaggaacttcctatgatccggatattgacgcttcatcgacttatgcaacggaaacaaaagtgaacaacagtaaaattttaagtgacctgaacccgaacattaaggtcactggagtgaaagcctttgaagttgataaaaacgcatacgctaaaggcacttggaaaataaaattcagcaacgatgttgaagtaaaagttaaataatgatcataacaaaagagaccttcaccatttgaaggtctctttctttttacaccttttgatatccgttcacattggaggattgccacttccaagagtcggcgcacatttcttcaagaccgcgctttgcttcccagcccagttcagccttcgcttttgccgggtcggcgaagcatgcggcgatgtctcccgggcgccgggcggcaaaacgatacggcactgcttttcccgatactttttcaaacgccttgaccatctcaagaacgctgtagcctcttcccgtgccgagattataggcatcggcgcccgttgtgtccagcaccttttcaagcgctctgacgtggccctcggcaaggtcaacgacatggatgtaatcccgcacgcctgtgccgtccttcgtcggataatcattgccgaacacctgcaattgctcaagcttgccgacagcgacttgggcgacgtacggcattaaattattcgggatgccgttcgggtcttccccgatccggccgctcggatgcgcgccgaacggattaaagtaacggagaagcgcaatgctccattcagggtccgccttatgcagatcgcgcaaaatctgttccagcatcagctttgtctgcccgtaaggattggtcgcgcttaacggaaaatcctctgtgatcggcgttgtttccggaacgccgtaaaccgtcgctgatgaactgaagacgattttttttataccgtatgcctgcatgacttcacataaaataaacgttcccgtcagattattatgataataacggagcggaacagccacagactcaccgaccgcttttaatcccgcaaaatgaatgacggcttcaatctcattttcagcaaatacccgttgaacggcgtcacggtccagaagatccgcttcataaaacacaagcccttttccggtaatgtcttttacccgctccaatgcttccggtgaactatttgacagattatccagaaccacgatctcatagccgctgtttaacagctcgacacatgtatggcttccgatataacccgctccgcctgtcactaaaatcgccatgaagaaagcctcccctattgaatgaactgtccatattatatagtttttttcttcctcaatcatccatttccaaaaagtttaatcgtttagtcatcgtttcttcataatttgttttcattcgcgtaaaaaacagagccttcgattcaaaacgggtggcgaaatagaaatccctcccccgcacatggtaagataagacaaaggagatgacggtatgaaaaatgaaatcattgaacgctttacctcttatgtaaaagtcgatacacagtctgacgaaaacaatgaaaactgcccttcaacccccggacagctgactttggccaacatgctggcggatgaattaaagtcgatcggcatgacagaaatcacagtcgatgacaatgggtacgtgatggcgactcttccggctaatacggataaagacgtgccgactgtcggttttctggctcacgtggataccgcaactgattttaccggaaaaaatgtgaatcctcagattattgagagctatgacggacatgatatcgttctgaatgacaaactcaatgtcgtcctttcgcctgaacaattcccggagctttcccgctataaaggccagacgctgatcacaacggacggcacgacgctgctcggagccgacaacaaagcgggcatcgccgaaatcatgacagcaatggcgtacttgatcaaacaccctgacatcaaacacggcacgatccgggtcgccttcacgcctgatgaagaaatcggcagaggccctcacaaatttgatgtcggccgcttcaacgccgcattcgcttacacgatagacggaggccccctcggcgaactgcaatatgaaagcttcaacgcagccgcagctaagcttacttgttacggaaaaagcgttcaccccggaacggcaaaaaacaaaatggtaaacgcttcaaaaatcgcgatggaatttcatcacgcgctgccgaaagaagaagcgccggaatatacggaaggatatgaaggcttctatcacttgctttccatgaacggcgacgtttctgaagccgccctgtcgtatatcatcagagattttgacagagagcgctttacagaacgaaaagaatatatgcagaaaaccgccgacgcgcttacggccaaatacggcaaagaaagcatcaagcttgaattgcatgatcaatactacaatatgagagaaaaaatcgaaccggtcaaagagatcgtcgacgtcgcatatcaagccatgaaaaacctcgacatcgaaccgattatcgaaccgatccggggcggaaccgacggatcacagctctcttacatgggactgccgacgccgaacatcttcaccggcggccaaaacttccacggaaaatatgaatacatttctgtcgatcatatggaaaaagcggtaaacgttattgttgaaatcgccaggctgtttgaagaacgcgcgtaaaaccaaagccccctgctttggtttttttctttcacgtgaaacctttccttctttctttccgtatataaggtatgaaatggaaaaaaggagtgaagactatggcaagaggcactgtagcgaaagaattgaaaaaaaccttaaaagacccgcgcgttttggaaacgaaatcaaatccttttaaaaagctgcggaaaatgttcaaacgatttttttaagataacttatcgttttcttacaaaaaataaagaaagcgctgtcaatctataatcatctgttagaagcagttattttgcatatcataggattttttagggtactgaataacacaaggcaaacgaaaacactgaattagttaattcgactctgttaaaaaatagtaaaaaagtgatataaacgttaatcattcagcagccgatacaatctatagaaccacaacatgagtgaaatcccttgcaacttatagtcgtttttacggaaaatgtcgttattttttaaaaaagtgacaattgtttgaatacttttcgtttgttttttcgtacaataataataccaaaactttttttgggaggtatgtaaaatgatgctacttatttttgctgctttgacaggatacctggttttctctttcagtaaggacaaccgccggaaaacgccaaagacaagcccgctggtgacagctgccgacacgaataacatcattgatttaaatgcgatccgtcaaaaacgccggatgccgctatcataaaaaacgacagctgccgcaaaatcggcagcctttttttatgcacctgcctatatgaaaccatccgcctcctttttacgtacaacataaaaaaggagtttttttatgaatcatttttatatcaaagagcgggtgtttacatttaagaatcggtttcaagtgtttcttgaaagcggaaaagaagtcttcaatgcggagggaaagttgttttcgttcggcgatgaactgaagctgactgatttggacggacgcacactcgccagcgtcagtcagaaactgatgtcgctcgttccccgttacgagatttccgtaagcggcaaacctgtatgccaagtcatcaagaaagtaacgtttttcaaaccgaaatttgaaatttccggcctcggctgggatattaccggcgacgtgtggggacggaattttcaagtgacagacggaaaatcaagccggatgaccgtcagtaaaacatggatgagctggggcgattcctatcatctgcagattgaaaatgaagaggatatcgttctttgtctcgcaatcgcaattgtgattgatatggttctatttgagggtgacaaataaaaatatttatcgaaatatattgacaattcgagaaaacatactaagattaatagtattacagtttattctgaaaaatagcatatttccttatcaagagaggtggagggactggccctatgatacccggcaaccgctgttcagcagaatggtgctaaatcctgaagataaggttgagatttgcggacgcaagctcttccctatccgagggaagagcttttttatatttcatcaggaaagaaggaatcgttcatgtcacagcaaaacacagagcaaccattgcacactcttctaagaaaaaacccgccgtttcgcgcggatcaggtcggaagcctgctgcggccggcggctgtgaagcaagcccgtctgcaaagagcggctgatgagatttcggcagaacagctgcgcgaaatcgaaaacaaagaaatcatccgcagtgtggaaaagcaaaaagaaaccggcctcaatgtcgtgacagacggcgaattccgccgtgcctggtggcatttcgattttctcgaaaacttagacggcgtcgaagcgtttacgcctgagagcggcattcagttccacaacgtacagacgaaagcgcgcggcattaaagtaacgggagatattgatttttctcagcatccgatacttgaagattataaattcctgcacagcattgccggcgatgctgtgccaaaaatgaccatcccaagcccgaatatgctgtttttccgcggaaaattggaaaaagcggcgtatcagaacgattaccaacaatttcagcatgatgtatcacaggcgtataaaaaagcgattcaggctttctatgacgccgggtgccgctatcttcagctcgatgataccgcatgggccgttttcttatcggaggcggggcttcgtcagattgaagctttcggcacgacgccggatgagctgcgcaggctgttcgccgcttccattaatgacgccatcaaagatcgtcctgccgatctgaaggttacgatgcatatctgccgcggcaacttccagtccacatggacggctgaaggcggatatgatgcggcggcggaaacgatttttgacggacttgaccttgacggattgttcttggaatatgatgattcccgctccggcggctttgaaccgcttcgttatgtcaaacgctctgatcttcagcttgtgctcggtttgattacgtcgaaacacggcgaactcgaagacaaggatgcggttaaacgccggattgaagaagcttctcaatatgtcagcctggatcagctttgcctcagcccgcaatgcgggttcgcttcgactgaggaaggaaatctgatcacagaagaacagcaatgggcgaaactgcgccatgtcgtcgacattgccgatgaagtctggaaataaaaaaaagacacgcttacagcgtgtctttttcgttttacagcggatcggttccgattaaaatatcgatatctatcgtaatatcagccgctttccggctgataaagcgctgaatgctttcatcagaacatttccatgttaagggcgtcattttcacaagcagctcaagatcaggctgcgataaggtcttcgtgtaacacagccgcttgcgctcaaaggcttgaaagccggtttggaaacggacggccgcagactcagcggtatcattccgttcaggactgtctccgaagaagaattcccttacttctttcaagtaatcgcgccgcggcaccgctttaatgactgtgccgccctttcttaaaagcctgctgcattccttgtaattccaaggtgacaaaacagacagaatcacatcaaaactgctgtcggcaaacggcgtatccgccacatcagcgacggcaaaaatattatgatccccgaaggcttttgcagcttgcagcacaccttctttcgagatatcaatgccgattcccgtcacggaaaaagcgggctgcagcaatctgcatacagcgtctaaatgggagccctctccgcatcccgcatccaataccgccgcctgttttcgcggagattgaatacggctgatgatgacggcgatctctttttgaaccggcgaaaaaaactcccgcctctcaaaaagctcgtgtctcgcttcgaacagctgcctgtcatagcgggttttgaccgatttattgaggaaattcacatagccttgttttgatatatcaaatgtatgcccatgtccgcatatcaggctttgatattgcgaaaccgccatggccgtgcggcatagcggacacctgaatacggactggcatgcattcagtaattccgcgcgttttcttttcatagacgtcaaaaaaaacacctcattcattcgttattctgatgaaatgaaaaaggcatagacaaataaacctcaccaaattggaaggtttaacctatttatctatacctctcattatctgtaacgaatgaactggatgatcatgaagatgaccccttttctgccgtcttttgaaggctgtgccctcagatccattttatcagctgcgtcccgttcttacaatgaaccgaactgtttctgcgtgcactttataccattaaaatccaattacttttacatatcctttattttctttatttataatataaatttattattttgaaaatatccaaaaaggttgattttcaaaaattgaaacgataaaatactgctatctcatgtaatatcgttattcttgtatatgatcagtaatatggtctgattgtttctacctagtgccgtaaaagactagactacaaggaagtttgcataaatttgaacgagtgaaaagcatatgacgctgtctattcttttcttttggctcttatttatcacactttctgactttcaggaatttgtgacgaataagagctttttttatttccataatacccttataggagttgctcacatgtactttttattgaacattgtcggtctcattgttgtcatggctgttgttttcttatgttctcccaacaagaagaagattaaatggcgtccgattgtcatgctcctcgtctttgagtttctgattacttggtttatgttagggacaaaagtcggcggctttgtcatcgggaagatcggcgcattctttacatggctgatttcctgcgccagtcaagggattgcatttgcctttccgtctgtcatggcgaatccgacggttgattttttcttcagcgcgctgctgccgattatcttcgttgtgaccttctttgatatgctgtcgtatttcggtattctgccgtggctcattgataaaatcggctggctgatttctaaaatatcccgtctgccgaagctggagagctttttctccattcagatgatgtttttaggaaatacggaagctttagccgtcatccgccagcagcttgccgtcgtcaacaacaatcggcttctgacattcgggctgatgagtatgagcagcatcagcggttcgatcatcggatcgtacttgtcgatggtcccgtccacttatgtattcacagcgatcccgctgaattgcttaaacgctcttctaatcgcaaatatgctgaatcctgtggacgtttctaaagaggacgatattatttacgtcccttcaaaagcggagaaaaaagacttcttctccacgatttcgaacagtatgctcgtcggcatgaacatggtcattgtgattttagcgatggtcatcgggtatgtggcgttaacggccgcgttaaacggcgtgctcggactgttcatgcacggtttgaccattcaaaagattttctcttacatcttcagtccgtttgcctttcttctcggattaaccggacatgacgcgatgtatgtcgcacagctgatgggcatcaagctcgcaacgaacgagtttgtggccatggccgatctgaaggggcagctgcattcactgccgccgcacacgattgccgttgcgacgacattcctgacatcattcgcaaacttcagcaccatcggtatgatctacggatcgtatcaatctctgcttgatggtgaaaagtcagccatcatcgggaaaaacgtctggaagctgcttgtcagcggaattgccgtttccttattgagtgcggcgattgtcggattgtttgtctggtaaacgaaaaaagcgataccgctccgttttggagagatatcgctttttttattgatagacggatgcaggtacggaaacgtcccggattcccgccgcgtatggtccaagatcatattgtccgaacacaacggcaatgccgtttttcgtaaagaagaaaggtctttcgttattcagggtgatctcctgttttttgacgtcttggtcgaacagatcgtcatgtttcttgatgtagccgtacagatagtctctcgttttgtttaccttcgttttcgtattcagcacatcactgagtgcgacctgtttttttgcggccagatcataattaaaggtctgtacggatgtcatcccgtgtgcgccgcctgtgtaactgtagttctccgtctgaatgctgagcttgccgtcttgattatacttcaccttgaaatctgtttggtattccgctttgtagccttgtttctcaccgtcttttttgtttttcacatattcttgatatgaatggtcaatataacgtttgaagtcctgattgattttcttttcaaaagatgcgtttcccgtatttgtgacctcggggtacgtcagctgcttcacttgcttatacgtatggcttttgacaacgggctttgcggtttgcgcggcctcggctgaagccgcaaatcctccgaacggcgcggctgtcagcactgccaaaagcacagccgccatcattttgaatgtctttttcatcacaactcctcctttttatttaccgttccctttttgaaaacgggttacactctatagacagcgcagatcaggaaattgtttctgggccatttctcacattttctccatcaaaaaaagagacatggaaaatccacgcctcttttaccgtgaaggtctttgcgcaatggcttcataaacggcttccgccagatcggagttgccgaacatctccaaaacgccgataacggtttgatcaggaatcgactcagattcctccttcggcacgacaagctcttcagccgtttttcgcagctcttcgtttaaaggctgtccgggataagccctgctgtaaatcgccatcggatcaaggtcatgattgacgcaccattgggcaaacaccaaaatcatcatgttttcgtcacgccggtaatattcttcgagttgtttttgattcatgtgctttgctccgctattattttttttattactttatcatatttatattaagacttcattctttttaggttttaagggattggacataccaaaataatccataatcaactcagctaatgagttattatcaggcggagtaatcttaattttctcattatagagttttgcaacttttgtttttatttttttatccgctaaaaattgaattaatttttccttttcacttccagcttcataatttgttggaataagtaatgaagctgttccatcaattcttgaaaatttaatgtttggattaaaactatataatgtaaataacttttgtatatcttcatttgcatttgcatttataatttctttaatagtttcataaaaagtctttggatctaaacaatcttcgataactgtttgttcataatactgaccttgtttccacggttctaaaagtctaactgattcgatattattactttttaatgtttgtaaccttctcaaatccacttttccataactttcagttgcttttgaaacattgatctttactcgatcagtatcaatcatacaaagaatttttccactcattgcttgggctgtagttttatcggataaaggataactcaataaaccatataatttaatcacattagaacatccaccaacaggtaaaattttaaaattccccgcatcttttaataattcttcaaggtataatttatctgtacttccttcgcatataatccaattagtatttttcatagattttgagtaactaataatgctagttgctaaatcaaacatactttttaatgctatatcatccggaaatcttcttctttcatctaaataatcaaaaaaactaaaatctgaaatcgaaacacttccttctatttctttactcacatgaagtaaatgaccgctattggtgatgggcagagatccataccaatgggtcgttatcatgacttgtctattaaaatctttcgaaagtctttctaacctctcgaactgcggaaaacaattaacaacattcatagacacttctggttcatcaatagccagaattaattctctatccatttctttcacatttgaaagaaatgcatatgcaatgtctattaatgcctttctctgctcaccagaacttagtttttggacttctctatttttgtaccttaatggtctttttgaaaagtaagcttcaataactttttctcttatatctgttactgttaaatttctcttactatttgcttcgggactgtaattatattgattatcaatcgcttttatagaattatttatatcttccataaatttattaagataatcatttataaagtttaagaaacttttatttttcccttctatttcatacctacttgtcagtaccttatcaatttctagtaagatatctttgttcattaaagtttgcatttgtttatcttcaattttcaaaatttcgttagcactttgttccacaggaatataaacataagcatagtgttcttttattaatttccttatcttttctattttttttatgtattctttatttcctaatattttttcaaagtagctctcgaaaggagcaagtgttggctttccattaaatttcacgcctgagggaagtatatagtattcttgttcagaatagttagttgttaggtattcaataaactcgtaaaaattttcaatgtattcccttctagcagctccttttaaccaatcttgtataccgctccagaatttgttgcttataatatttatatcctctaaagtttttttatttccatctatctcagacctgctgtatcgatttgaattaataataaattcttcaaatttattcctttcaataaaaaatacaggggttatataccgatcctctctcctagatcctcttgttgcattccaatctcgtccattaaagaaaacatcaagtgactccaaaattccacttttgcctacaccatttgcaccaatatagacagcatacttttgctcattgttatttgctataggtgcaaaaattgattttgcatatgacttatatccgttaataaaagttcccacaatcataatacttatcccccctaaaatttttattatattccagaatatcacacttaaaataattattccattctaaaaaactaaaaaagtacccttagcagggtactttttactatctttatatgtttctgtcccaatgccgatgctcggctacggccttcagaaattgttcatggtttccgtccggaacaaggccggggccgctttcggttccggcggcgagggtgagaagttcttttccttctccggaggcaccgatcgctttgtaatgactgaaggcttcactgacgaagtctttagccgcttttcgggctttgagactgtctgtgcttcgttgcccgcccggaatgaaaacagcatcatacaggacggaatccgctgtcaggaaagtggctgacgcttccagctccgtaccgttttctcccttgacggttccaagtgcagggctgatgatatcggctctgactcccgcctctttgcatacggcaagcaattgtttgacttcctcgtccgcaaacccgtgatcggccaaaaccgcgacctgtcttgtggctgctgttttcaccgtgttttcctgacttaaggccggggaagtgaaggtttcatcagattcacgatccttcggcggcgggttcactccgattcccttcgcaacgcgctcggcaagctcggcgtcgacgtgactgaagacattcaccacctgctgctgcacatccttgctgtttactttccctacctcaaaacagaacgcggaaatgatatgttccttttcggcgggagacatgctgttccagaacatcttggcctgagaaaaatagtcattgaagctctcactgcgctggcggatttttctgccttctactttttcctgataatgaacgtatccgccttcttcttctgaggccggcgacggatcattattctgcagagaattcttatgataggcgacagggcccttattaatcgtcatccggtggtagccgtcgtattggttgttatggaacggacagaccggccggttgatcggaatctcatgaaaattcggcccgccaagacggatgagctgtgtgtctgtataagagaaaagccgtccctgtaaaagcgggtcattggtaaaatcaatgcccggcacgacatttcccgggtggaatgcgacctgctctgtttccgcaaacacattatcctggttgcggttcagcgtcatttttccaataatcttcaccggcacaagctcttccggccacagcttggtcgggtcaagaatatcaaaatcaaacttgaattcatcttcttcatcaatcatctgaacgccaagctcgtattcaaccttgccgccgttttcaatggtttcccacagatcgcggcgattgaaatcgggatctttcccggcaattttctgcgcttcatcccatacgagtgaatgaacgccgagaaccggcttccagtggaatttcacgaaacgcgcctttcctttctcattgacgaaacggaatgtatgtacgccgaagccctccatcattcggtagcttcgcgggattccgcggtcagacatcgtccacatcaccatgtgcgcggattcaggattgttggcgacaaaatcccagaacgtatcatgagccgtcgcagcctgaggcatctcattgtgcggttccggttttaaggcgtgaacgagatccgggaacttgatcgcgtcctgaatgaagaacaccggaatattgtttccgacaaggtcgtaattcccttcttcggtgtaaaacttcgtcgcaaatcccctggcgtcacggactgtgtcggctgaccccttggagcccgccactgttgaaaaacgaacgaagacaggcgttttgacagacgggtcctgcaaaaatttcgcccttgtgtattccgtcatcggttcgtacacctgaaaatgcccatgaacgccgtacccgcgcgcatgaacgacccgctccggaatccgctcgtggtcaaaatgcgtcattttttcgcgaaaatgaaaatcctccatcagcgtggggccgcggacacccgcttttaaagaatgctcatcctcagacacacgaagcccctgattggtcgtcatttttttgccgctgttatctgcccggtactgctccagctgctcgtcctttgagtgttcatttacacgtttgttttgatcctcactcatgtctattcccccttatcaaacgaaacattctacagcacatttacccgcggcgttcttcatataaactgctgatctgctgattaggattttaggtctacatataaatatgcggccatacacatttgaaataagccttcttcacagaaagaaagtgtggaagcgcttaccaaaatagctgttgaacaggggaggtcatatcgtgcttgccatactcggttttgtgatgatgattgtctttatgtatcttattatgtctaaccggctttccgctcttattgctttgattgtcgttcctgttgtgtttgccctgatcagcggattcggcaaagatctcggggagatgatgattcagggcgtgacagacctcgcacctaccggtatcatgctgttattcgccatcctgtatttcggcattatgattgactcaggcctgtttgatcccctcattgccaaaatcttatcgcttgtcaaaggagacccgttaaaaatcgccgtaggcacagcggttctgacaatgaccatttcgctggacggagatgggacaacaacctatatgattaccatcgcggcgatgctgcctttatacaaacggctcggcatgaaccgtttggtgttagcgggaatagcgatgctcggttcaggggtcatgaatattattccttggggcgggccgactgcgagggttttggcttccttgaaattggacacgtcagaggtcttcacgccgctgattccagctatgatcgccggcattctctgggtgatcgccgttagttatatcctcggcaagaaagagcggaagcggatcggcgtcatttcgattgatcacgcgccctcttccgtgcctgaggcggcgccgctcaaacgtcccgctcttcaatggttcaacctgctgctgactgtcgcactgatggccgcactgatcaccagcctgctgccgcttcctgttctttttatgaccgcgttcgccatcgccttaatggtcaactatccgaatgtcaaagagcagcagaaacgaatctcggcgcatgcgggtaatgcgttaaacgttgtctcaatggtgtttgcggcaggcatattcacaggcattctctccggcacaaaaatggtggatgcgatggctcattccctcgtttcactcatccctgatgccatgggcccgcacctgccgctgatcactgcgatcgtcagcatgccattcacctttttcatgtcgaatgacgccttttacttcggtgtccttcccatcatcgccgaagccgcttccgcttacggaatagacgccgctgaaataggaagggcctccttgctggggcagccggtgcatttgctcagcccgcttgtgccttccacctatctattggtcggaatggcaggcgtcagctttggcgaccatcaaaaattcaccatcaaatgggccgtggggacaacgattgtaatgacgattgcggcgcttttgattgggattatttcgttttaatcaaaaaaggatttccgcccagcggaaatccttttctgtacattatttttttgtatagcgcacccagtcgtaatgagcgtatagcggatttacgccattgtaggaaccgagccaatcatcgacacccgtaccattccacaaattcatcatgattttccccggcgctgccggtatttgggttgtcgcagtatgttttaattgcccatcgacataccatttaatagagtttggctgccaatcgaacgcatacgtatgataggcattggctgcatcaaatccgagatccgccaacttctcatggtttcctgcgccatttgtataatagttaaattgaacctttgttgtgtcttttcccaaaaattcgatatcaatctcatcccaaggagtcccctccgttggacctgtataagtgaagaacgatgaaacaatccctgtgtttttagccggtttcattctgacttcataaagtccatagccatatgtttgaaccgagcggttttccccgcagtcaaacttgttataagacggacttgtcagcgccaaacgcatttcacctgatgacgtcatagagacgttattcgcacgccaagtgcagttaaacatatctccatttgagtaaccatcagctttttgccataacccggagttatagctgttaaaaggttcaaaaaacgatccgcctgtttgagccgaaacactagaagtgatcccacacaaactcataaacaatccggtgacaagaattagcaacactcgtttcatgttagcattcccccttttttgaacacgctttctttattgatcatacatgatccttttcaaagggaacatcggtcgaaataatgataatccttctgttaaaaaatacaaacctaaactaccatcagcacagacagataggttttgcctgcttatccgtaacaatcctatatatgaatggaagaaacaattaatacgaggaaacgctttcattatacttgtttgactaccctttctatgtgaatcgttaaatacagcagctcgtcactggtgagcttatgcccatactctttctcaatgtaggtatggatattcttcgtgcatttatacgcctgatgatacttttctttcactgtctccagtaaaaaatcgtcctggctttccatgtgtgtgccgttaaaaagacgctgtgcgaaaaactttaagtgggtgacaaatcgataatagtgcagcgattcttcgttgaattcaatcttaaaatggtattttacgatactcaaaatctcttgcatgacttttgtaatgttgatgatattgggcatctcttcattcagctcggcatttacaatatgcagcgcaataaagcccgcttcatcctccggcagagacacgccagtcttgttttttaccatggccaacgcttctttgccgatggcaaattcgtctttgtacagccgctttgtttcccacagcaaggcatttttgatatcgagccctttctgattgcgctgaatggcaaagttaatatggtcggtcagcgatacatagatgctgtcgttgagttttttgccgagctgtaatttcgcatagctgataatctcttcggatacttccatacactcgatcggaatttcatacaaaagggttttgaacttttcggatacatctttgttatcgagcgtgaacactttctcaatgagggcttcatctaccgggtctcccgttttcttttgaaaagcaatgccccggcccatgatgaccaattcctgattgccttccttgagcacactgacgacattattattaatgactttcgcaatcttcaattccgtctccctcccacctgaccatttacctgttacaccttgattgtacatcctttttgaactaggtcaatatctccaggtcaatcagaaaactccgttcagaaatcattgtccaactatgtgacagaggcgcatataatgcagagaaccggtttttgagaaggagcgtgtgtgatgaaacggttttcgaaagaagaaagcagctggatgctgtatgattgggccaattcagcttattccgtcattattatgacggcggtgttccccctgttttttaaagcggctgcggctgaaaacggcgtcagcgcggccgattccaccgcttatttgggctatacaattgccgccgcgacttttattttggcgatgctcggccccgtcttaggaacgattgccgactacaaaggatgcaagaaacggtttttcgctttctttttcctgatcggtgtggcgggcaccgccgcgctggcttgtattcccggtgaatcttgggtgctgttattaatttgttatacgatttccacgatcggctttgccgggtctaatgtgttttatgatgcgtttctcgtagatgtggccgcaaaggagcggatgaacatggtgtccgccagggggttcgggctgggctatatcggcagtacgatcccttttcttctcagcattgccgtcatcctgtcagcacaagcggaggtgattccgctgtccgcccaggctgcgggccgcattgcctttttgattacggccgcatggtgggggctgttcacgatcccgctccttcgccgcgtccgccagcgctattatatcgagagagagcctcggcttgtgatcagcagttttaaacggcttgccggcacgctgaagcagatcaggaagtaccgggcgctgtttttgtttctgctcgcttatttcttctacatcgacggggtcggcaccatcatcacgatgtcgacgtcatacggggctgacctcggcatcagcgctgcaaatctgctgattgttttatttgtcacgcaggtcgtcgccgcccctttttcgattttgtacgggagactggccgaacggtttaaggggaaaacgatgctttacgccggaatcggcgtgtatatgattgtctgcacgtatgcttattttatggattccgcttttgatttttggattttggctatgcttgtcgccacttctcaaggcgggattcaggctctgagccgctcgtactttgccaagctcgtccccaaacagcacgccaatgaatttttcggcttttataatattttcggcaaattcgcttcaattatcgggccgcttttgattgccgtaaccgcccagctgaccgggaattcgtcagccgccgtgttcagcctgatactattatttgtgatcggcattgccatccttgcgtttgttccggaggagacggcgtaaaaaaaagcctgcgtgcacagcaggctttcttttttatttcttggctttatggactttcagttttttgcctttgaccgtcgtatttttcataatgctgagaacgtgcgggcctttgccgttcagaatctcgacgtacgaagcgttgtccagaatcgtgataatgccgatatcatctgctgaaacgccgtcgattttcgcaatcgttccgacaaaatcgaccgccctgatttttttcttttttccgccgttaaagtacagcttcataatgtctttgtttaactgttcgcttttgtctgttttgacgtcggggcgggcgttcaatttttccgcaaaagccgctttccgttccgctgtttctttctctgacggcgcctcccgctttttgatgcggaaaccgatatatgtctcaatgtcattcagaaatcgcgattcagacggcgtcacaaacgtaatggcccgtccacggtgtccggcgcgccccgttctgcctgtgcgatgcacatagctttctttttcaagcggaatatcataattgataacgaggctgatgttttcgatatcaattcctctggcggctacgtcggtcgcaatcagatagcggaactcgccgcgcttgaactcattcatgacgtcaaagcggtcttcctgcaccatgccgccgtgaattttatcgcaaggatagcccagcctgtccagctcatcggttaactggataactctttcttttgtccggcagaatatgatgcagctgtccgggttttcagtgatcaggacgtcacgcagcaatgatgatttatcctcttctgctgctctggtgacaaaatgctcgatgtctttagtcgtcaggccttccgcttttacttcaatcaattccgggtccttcatatatgtgcggctcagcttctcaacgtcgtccggcagcgtcgctgaaaacagcatggtgactctgtttttcggcaggtgctgaatgatggcttccacctgttcaataaaccccatattcagcatttcgtccgcttcatcaatcaccacatacgccagccggtcaagcggcagcgtccctttttctatatggtcaagcacacgccccggcgttccgcaaacgacatggcttttttgcttcagttcggttttctgtttatcaaaagaagcttttccgaaaaccgccgtagcttttatccgtttaaaacggccgatattcgtgatatcttcttttatctgcgccgcaagctcgcgggtcggcgttaaaatcagcgcctgcggtttgttttcctcccaatccgcaagctcacaaatcggaatgccgaaagccgcggttttgccgctgcccgtctgcgatttgacgacgagatcttttttttgcagcgcggcggggatgacgcgccgctgcacttcagtcggctcggtatattgaagtccttccaacgctcttgcgatgtcgaggctgatagaaaaatctttaaattcgctcatgaataaactccttctctgtctaactcccctcattatacgcgaaacgccgccgctttaccctgacgttttgccgggccattcggaggactgctttttcttcatgtcaagtacgacccatttggcgcaataaaagctcatgcttccttccacgtcatcgacataatagcgtatcgattcccagccgccgtcgaccgggctgatatccagacggatgtcggtgatgctttcaagatcatccagccgggcagcgctcacaccttcaaaccgcagcacagcatcatactgtccatcagtcagcttcagctcaaataccgggattttatcataatactcgttatacccagtaaagaaagtaaactccgtcaattcaaaacaccccggtgaatccggcctcagcataactgctttctcatgtttgtgccactccattttgtgtctccttctttacagctgatttggcatgcctggtttatacggtattttttcacaatacgtatgtatttccggttacttatatccctgcatccattctcttaattcttctgtggtatgcagatatgaatcaggcgaatctttcagatcaaacccgctcaaatacacgagcatctcccaaacgttttcatcctcaacctccggatcatgtgcagccacatactcacacgcccaatccgacacttcttcccttgccgcttgaccgttcaggatcagatcagccttcttcagacattctgccattgttggttctttcacgttagaaacctgcttttcgatttcctttcatttcttgtttaaaatgctgactaacagcctcctggcccgttcgtgcagcctgacttcctggctgagctccgggtaatctgttaaagcgttttccagatgcgcatattgaggatacagctcaaaaaaggatttatataaggctttacgctgccgcgcaggcatttgtttattcgccaaaacaaaatctaagctgccgcagacaagcgcgaaatattcataaaaatcccccgcgcaggcaacctcctcaaagtcttcttcaaaactccccgcatctgagggtagcggaccctccaattcttttttgtgaaacttcaggtttctgatgaggtcatcatttaaagaatatctgctggatctcaacatttcatttagccgaaaagaattcattttgtttcccattacttatatcccgcttgtagatccccgaagtcgagaccgcgtaaatggcattacttgtcagcttcagctgatgccccgaaagctcaccgccatccggatcacagcacgttacctcttgcaccggcagactgacatcagccggaatgaaggacagtgaatgatcatctttgcatatccaaaacccgtcatctgaaatcgcaagctggtcatatacccctgaacatgctttatcagaaataatccacactcgtttcacgtcggtttcatcaaacgcagcaatgactgtatatgaataatacagcatgtagatcagtccgtttttttctgcaagcgcatagcagtcatctacaacgggcgcatatatttctgaaagctgctgatcaatatgcgtttcctttaattgtccgtctaaagtgaagcacagcatactttgaccatttgaattttcatcatcataaatgccttcatcacttaaaccgacccataggttttgtttctcatccagaagactgcatgaagcccctgaaggcagagaaaatacactttgttcttttccatctgctgaaaataccttcactttatgctcatgcgattcaaagaaaaccaacacatacctgtcatccgaactctgttgaaacagcataatatcctcactcggaatttgttcatcgatatgaacctctcgggtgtcgccggattcctccgtgatcgtaaacgaaagactgccattctgatgccgtccgagatacagacgcccgcagccgtcaaaatgacagaaacatccttttaccagatcgtcatgtatcttgttcatttttattttcatgcaattgccccttgctatttataatgagcggcgagctttttttgaaattcatccggaacaatctgatccgggaatacaactgatatccagtctaaaacatgatcatctaacggcctccatgattctaacgtttttcccgcaatctcctgatcaatgcctaaaatacaaatttcaaattccctctctccgtaaatcgcccacttgaaagtcggtgaagcccaaacaacacgagatgcaatgttcaatatacagtcatttttactgtgctttggataatcagttaagattgaaagatattcatctgcagttatatgcaaagggatctttaaccagttaaaatatccgaattccccgtaaaaccgattcatatcatccgagtgttccagaacggccattaagataaattcatcgtgatgatgatgcgccaaacttttgagcatcatccagccttcatcagacaagacccagtggaattcctcgaatagataataatgtttttgttgtttaaatacttgttcgggcaacgttttgtcttcatgaaataaggaatatatctgggattgaaagactgccgattcctttgtgttctttataaaaaaggggtgcatcttgtacctctcttcggcggtttatatgcaagctcacagccgtattctgtgtggaataaacggtttcccacgtataaatgtatttgctgcagatccacggtttggtttctgtcctttaagaaaagagaggctgggaacctctcttatttgtttatttatgacttcgaatgatacgcataaaatgattgattatcaaagcggactgtttcagcttctatagcaatcagcattctgttcatgtcaatgagaaagttagcatttgattggtactccggaattacagaatttgatagatttccgattccttccgggtgataactcatctcaaatacttgccaattgtattcttcgggatctattttttctaatctcatatcaccaatatctgcgctaaaataaacagatgctacattttgaaataatattttatgtgtatattcactttctttttcaaaaaccttaatattaagtgaaagttcttttttaaacacattaaagtcaaaatgaaggacagcgcacccctcatctatataatcaacccactcatttattgttttgtacatcgtttatctcctaaggaagttttggaggattttttgtgtctttgagatctgattttaaagtcttcacgaaaaattctagcttttcttcattacagttcaatttatagacagttgtatttgaataattttctacaaatctaattataaatctgtaatattcgttttctttatcaattctcaaaataaaaaatggttcaattgtttctaaacgtatcctatcttgattccctgctaataatgcttcaatccctgatatcagcattttatattcactttctaataaagcggcggagtaatcccgggcgattactttattatgttccaacagttcaaacattgttgagataaaaggatcatcctccgcctcttggtaccttctcggtgttatgtcaagttccagacaatcatctctaattttggccatgctgcctcctcgttttgggtgaaaagagaggctgggaacctctcttcgcattaacagactaggattcatttaccatttcaatcatttctgccgcttctaagtacaattcatttatcttgttttgaatttcttttgcgatttcttcatcactttctagatctgataaatatccagctttacctgaaaacaactttttttcacaaaccctaaatggtctacacaatagccgtcttcattatcgcgaaagtcggtgccgtccaaataagttgcagaaaaaaatatcagtgaattataggtactcttaaaacaatctgaggcccgtacttcttttcctattttttttcgtctctaaaagcagcttcaattttcaaacccatttttctaaacttttcttgattgtttcttattttgtttaatgcgattcgttcaaattgtttttctatttgtaagatctctttttgtgtaatagaacgcaggttgatttttttcatattacacctcagtattctggaattatcctctttccatagccagtaatgagttaaagtgagttaagttccacttcttgtgcaacacagttttaaaaatagtaatattattgaaataacttatcaatattttcctaggtatttaaggttattttaaggatttcagggatttatgaccttttactcacaaaaaaaccgccggtgccggcggttttcgtattatggatagcggagatttgtattttgcgctcccgcgtaggattgggcgaagtttttggcatcctgtgctgaaagcgcgccatagctgtaattcgatctcggattccagccggtgcgcggtgatttcggggcattgagcgacgggaatgaaccgatgtcggtaaattgggccgttccgtagtcgtctatcattccgcctttttcatttccgttaccgaaatagttggcttctgagaagacagtcgcgtttgtatgaatggtgaatcctaaattgaaattggtcacatagttgtttttcgcgtgaaaatagccgtatctcatcaagcccggcgaacggacatagacgttattaaaatagttgttggtgatggtcatatgcggatagccgatataattgcgtccttcgttatcatcattcggataaccgagaatcaagccgtacagatgatcggagaatttagaattagaaagagtcacaaaatccgctttggcaccgacgtacagaagctttcccaaatcgctgtggctgttcggattgtagctgtgcccttcaaaccacacgtggtcaatccagtaattctgtccgttcgctatgtacatcggaatgtcgttgttgcccgtaatgctggcactatggctgataatgaggtttttgaaaatcacattgtttgagccggagcctgttgtcagatagatgttggtcagcctgtggctggtataagagccgacaatggttttattggcgccgactgtcacaacggctttacccggagagtaaatatcacttgtgatgacaatggttttgcggtctgtcccgcccgcattgtttttcaaatcattgagattgctgacatagacaaaggagccgccctggcctcccgatacggcggattttgcttttccgttatgatccttcgcatttcctgcgaacccggtaagtccctgcatcacatccggataagccgctgccgcttctgcctgcttggatgcagaacataagatagccagacaaagcgcaaagccgagagcagccaagaaagcgagatgacgcgtcttctttatcatgcccttcactcctttaatctcttaaattgtaaacacaagaagtattatacaactactatcctctttttccatgatctgtttgtctgctttttcgttatggctgaaaagccccaaaacgtaaaaaagcagcctggacggctgcctatatacgggtgctgtctgcctgagcctgctccggcacggctttatgctttctcattagggacagcgccatccctgcaaaaatcattacaatccccaaagattgataaaggtcggggcgaaatcccgtaaatacggtgtcaagcacgatcgcgacagccgggtcaagaaatacgatgattgaaataaaccgggtggataaaaaccgcaggctgtcaaaaaagagcaaatacacaattcccgtgtgaatgatgccggtcgacacaatcataatccagttcatatgcgacaaatcagaaaaagcgccgaaacggacgaacgggagaagaataatgacgcccaatccggtctgcaaacaggtgaccgcatatgggctgaggctgttgatgcctttcccggccagtgtcgtaaaggcataaaaaagagcggccagcacggcccaaataatccccgatcccatcagctgggaaaaggacgtatttccgttgatgccggaaatcagggcggttcccagaaaacaaatcacgatagaactgacggatgcgagacgcagtttttcccggtatatgagactcccgaggagaaggacgagaaccggagccaaatgatagacggaaatcgctatcgtcactgatgtctcctcaaacgatttaaataaaaacacccagttcagcacaagaaaaaagccgcaggccagcgtctgcagaacctcccgccggttccattgttcggtgcggtaacgtccggaaccaaaccagcaaacacccagaaacaatgaggcgcacagacacctcacaaaaaccagttcaatcgacggcacattcgtatgttctgagaaaaagccgattgatccgaaaatcaccatagaaatcaccattttgatgacggcatttgatgtttgtttagcttgcatcgtgctcttcctccatatcattgactgtttattcagacaaatactaacagccattttacttgattcagaggaagaaatcatcctatttttcagccgggggcggtcttttctcatgaaaaaagccccgcatcagcagggccgtttgtttaatgaacgatcagtacaggacaaggagacaattgtgagaccttgtggctcacgcttccgagcatcatttctttaaatccgctgattcctcggcttccgacgacaatcagattgaaatgctgttctttcgctatgtttaaaatttgatgcgcaggctcaccttggacgtacaggctttccgcttctactccgctttccgccgctttttgcttggcatcttccagaatggctgctcctttttgctcgacttcatgtttgatgtcttcaatgaagttctccggaacatagacaatcccggttaaggctgatgtggaaacaacggcttcacgtcccgcatagagaatggtgagctcagcctgctgttctttcgccaggtggatggctgcgtccagggctttgctgctcatgtctgaaccgtctactgctgcaagaatttttttaaacatatgaatcccgcctttctgcttttattgtcctcctctcattgctgaatgtcaattttgccggctttctccggaacattgccttacagactttctccatttgtcgcgatgacgtctttataccaataaaaacttttctttctcttcctttcaaacgtgcctgttccgtcattgccgcggtcaacatagatatagccgtagcgttttttcatttcagcagttgaggcgctgacgaggtcaatcggcccccacgacgtgtaaccgatcaggttgactccgtcttcgatcgcctctcttgcttctattaaatgatcccgcagatatttgatacggtaatcatcctgtatgcttccgtcttcctccggctgatcttgtgcgccgagcccgttttcgacgatgaagagcggtttctgataacggtcgtacagcgtgtttaaggtaatgcgcaagcccttcggatcaatctgccagccccattccgaagattccagataaggatttttcacgccgccgagaagattccccttcgattgcgccagatcctcaggcgcggtgcttgccgtcatcgacatgtagtagctgaagccgatgtaatccaccgtgtgttctttcaggagctcctcgtctccttccttcatctcaatcgtaattccggtttctttaaagaagcgcttcatgtagcccggatagctgcccctcgcctgcacatcagaaaagaacagcgtgctccgctctttctgcaaagccgcatatacatcctccggcttcggcgtcatcggatacgtcgtcgtcgcggcgatcatgcagccgatctgtgaatccgggatgatctcatggccggcttttaccgccagcgcgctcgccacaaactggtggtgggccgcttggtacatcgtgttttgtttattttcgccttcccggaatacgagaccgccgcctgtaaacggagcgtgaagaacgacattgatttcattgaatgtcatccaatatttcaccttgtctttataacgggtgaaaaccgtgcgggcgtacctctcatagaaatcgaccgtttggcggtttctccagccgccgtaatttttcaccagaccgagcggcatctcgtagtgcgaaatcgtgaccaccggttcgatctgatgttttctcaattcatcaaaaagacggtcgtaaaattgcagcccttcttcattcggctctgtttcatcgccgttcggaaagattctcgtccacgcaatggaggtgcggaacgctttaaagcccatctccgcaaacagagcgatgtcctcttgatagcggtgataaaaatcaatcgcgtcgtgatacagattcagcgcatcgtctgtctcatggaacggtgacataatgccgtccggggagacatccgccgtggaaagtcctttgccgccttctttgtaagctccttcaatctgattggcagccgttgcgccgccccataaaaaaccttccggaaatctcttcatgttttctccacctctttttcaggataacgccagaagcgcttcattcggtttgaccatgccgctttttttcacgtctgtaaatgaatattgatccgtattcgtaatgatgaccggtgtgatcacgtcataaccggcagcctttatttcttcgatatcaaaagtaatcagcagatctccaggcgcgacagcatcgccctcttttacgtgcacctcaaaatgtctgccatccagccggaccgtatcaagcccgatatgaatgagaacctcggctccccgggcgctcgtaataccgatggcgtgctttgttttaaatacggctgtcaccgtgccctctacgggagaaaccgccgcgccctcttcaggcagaatcgcaaagccttttcccataatttcaccggaaaacacgctgtcgttcacttcacttaatgctttcacttcacctttaatcgggctgtgaatgatttcgccgccagccgtcacccccggcattccaggcgctttggcctgttcgggctgtacatcttcaaacccgatcagcagtgccgccgcaataccggccgcaaacgagataaaaagcccgatcagcgcgtaaagaaacgtcggcccgataaagaccggaatgctcggcagaccggcgttgccgccgacaatgtaggaagcgacgccggttacaccgtaaaaagctccgcctgccgcaccgccgattaacgcagccgcgaacggttttttcaatctcatgttgacgccgtacatcgcgggttcggtaatgcccatcaaagccgtaatgcccgtcgtaaacgccagcgacttgaatgttttgttctttgatttcaagaaaaccgcaaatgacgcgccggcctgccccatgttcgccaaaaacatcgcaggcagaatgtaatcatgtccgttttgagcaatattattgatcatgatcggcacaagcgcataatgcatccccgtcataatgatgagtgaaaatgttccggcaagcagaatcatcgcggcaatgcccgcatgattgaacaaataattgacgccgacagacaggtaattcccgagaatcgcgccgagcgggccgaccgtgataagcgtgacaggcacgacgatcacaagcgtaagcatcggcacaacaatcaatttcaaggatgaaggggtgattcggtcgatccctttctccacataggacatcagccatatcgccagcaaaatcggaatgactgtcgatgaatacgtggcagcggttacaggaagaccgataaaggagatgcttttccctgacccaagcaaagccgtcaaatccggatgcagaatcgcacccgccacagcggccgccacgtacggattgcttccgaattttctcgccgcgcttaccgcaagcaaaagcggcagaaagtaaaacgcaccgtcgccaacagccgtaagaatgctgtgagtctggctcttctccgacatccagccgaatgtcaccgctaatgcgacaagcccttttatcattccggctccggcaatcgccggcagaatcggcgtaaacacgccggaaatcacatcaaacacggcgctcagcatatttttcttctgcttcgaggttttgtttgcgctttcatcactgagcccgctgctctcgatcaaagcctgatacaccttcggcacatgattgccgataatgatctgaaattgcccgccgctgatatttgtccccatcacgccttctgtctgctccagtgcgttccgatctgccttcgcattgtcatacaaattaaaacgaagccgcgtcatgcaatggatgacactctgaacattctcctccccgccgacaagttgtaaaatctcttttgatattttatgatagtccatgagtctgcctccttaaaaatgggggatctgccggacgaaaggtggccgcctttctccggcttttttttatgaaataagcatcacctccgaaaaaagggtataaaaaaaacctaaactgcacagagcaagggggtcttcccctgcctgacgcaatttaggttttgcctgcggtttgcagtaacaatcctaggtgaatgatattgggttgatatgtatactttagcactagggttatgggggtgtcaacgcttacattttaatgttctgttgaaacaaattaaagtctaagttatacgcaagactaagccttcccttccacgtatacggcaacaatgaggctggctgattaaatggttgatatctgaaaactcaagtatcaaatgtgcatttcatatctggggcgtttcagcttttcttccagaaatcaaaaacctcttattgtgaattctaattgtgatagatagctatgctctggccctacaactcattcttgccttttttctttttaataaaggcttcaatatgattaattgtttccgtaaaattctctttaaattcatgttcccatatccttaatacatgccagccgatttcttgataataggaagttacttctttatctctttctttatttctctgtaactttttctcccaataagctgaattgctctttggtttattcccatgaatactgcagtcatgccagaaacaagaatcaataaaaatcacaattttgtatttttttatagctatatccggttgaccaaaaagagattttacattccttctaaaccttaaaccccttctccataattctgaagaaactttatcctctaatttagacttagattttattgcttgcatgttttttcttctttgctcttttgtatgagtatcacccattggctttaacctctcttttaatatttaatatatttctttcctatattaagagcaataaccgtcatttttttaaaaaataaacttgcaacgtaagcttaaaaaagggtatgctgctatagaaagaaacaccgaaaaacagagaatatatttcctataagcagaaagagttgaaagaaatgaacagcaataataagagatttaaactggttgatttatttgctggtgctggaggtctaagcaaaggatttgagcaaactggctgctttgaaacaattggagcggtagaaataaatcaagcagctattgaaacttatgtttataaccacggcggaaacagagacattattattaggccggacgaaagtgataccagtgacattagtaaaatcgacttccgtaaatggaagaagagcaaaaacattgatcctaatttgttaacaattattggcggacctccttgtcaaggattttccaatgctaataggcagaaaaattatctgatatcaggaaataatcagcttgttatagagttttttcgtgctattgatgagatccggccagctgcatttcttatggagaatgtgccatcgatgaactcagataaacataaatttttcatcacaaaacatttagataattcgcgctttgcatatagctctttagaacatttaacttgcttatttaatacatcaaaagaaaagttgattgaaaataagtttttaatggatgataagataattctaatggagtcagttgaaatatcactaagtcatatttggagaaaaatcatcgatggttcaactccccctaaaccaataattggggatcataactacttatcccgcttgaaaagtatatcaaaaaaaattataaagacagaaggtaatcctagcttgtcactaaaggaaaaaaaagatattattcgaattattgagttgattaatcaacaactaaaaaccttccaagcagatggagatcacctaagcactaaagatatagtttctcgtggaaaagcagcactccaattgctgcttgaggattttgaggaatttgataaatgcgctaaaaaagatatcactaactttatgagtttaaatctaatactgttaagaataaaagaactaaatgatgaaaaaattagatatgagctttatatagatgatacacataaggataatattaaaatcattgcaaaggtttggtcttataatattgtaaaatatcttgaaatggcattccaccaaattggatataatactgatttcggggtcttaacagctacagactttggcgtaccacaaataagaagaaggtttatcatccttggtgttagaaatgatttatttgagaacagtccgaaacttcccgatgcgttggtacactcaacaccttttacagtaagggatgcaatacaggatttagccgatataacgccccttacagatatggaaaaagctaaaccattagattatatagaatcagatgcgcaggcatcgcctatgcttcgatatttcagaaaagatgctgataaagggttgattgataatcatataaatactgaaagccgtcagctaagtaaaactcgttttgaagcaatacttcaattgaaaggtaaaaatttccacagtcttaatgatgagttaaaaacaacctactctgatgtgtctagaacacagaatacaatctatttaagactagactatggcagtccatctcctacagtcgttaacgtaaggaaatcaatgtggagtcatccagaaaaagctagagcaataagtattcgcgaggcagcccgtctgcaatcatttccagataattttaaatttagagggacaaaagatcagcaatatcaacaagtagggaatgcagttccccctttgcttggacgtgcagcagccgaggcattattaaatgctatgggtgttgagcctactatctcacttaaaaatgaattattagatttagaataacaacaagcttgacgataaaatcagtatatcgtcaagcttttttgataattcttgttaaatctttttagaaagatatacgtttggaatgaacttattttattatagttatattaaaaaattgaaaaacagggggatttatgaacattatactaacacggccatcagctgcaccagtacttcatgcactcagatcaataggttataaagcaaaaactgcaattgcagatatagttgataatgcaattgatgctcaagcctcaaaaatcacattacactttgaatatgataaacttaatggctatattaaaattgaagataatgggaacggtatgagcgaagaagaaatacagactgcaatgaatataggagcaaaagatcctagaactaaaagatcaccaaatgaattaggccgttttggaatggggttaaaaactgcctcattttcattaggaaaacgcttaagcgttataacaaagaaagatggagtataccatgagagatgctgggatctcgattacgtatctgaatgcaacgaatggaatctgttgacttctatacctactccggttaaagaagtggcgggcgaaattaatggatctagtggtactgtcataataattgataaacttgatcgttatatgcgcaataaaaaaatacaacgaaaaacttttttttcaaaaaccgctcaaattcaaaaacatcttgaatttgtttttcatgatcttatagacaataacaagattattatttctataaacgatgttgaattaactccttgggacccttttatgactgagcatccctcaataattgaaggagaagaaacactatggaaattggatggacataaaatgaaagtcaagtatacaattcttccccatgcctccaaacttactcgcactgaatttaaaaaagcaggcggcgaaagaggatggagagatcaccaaggtttatacatatatagggaaaatcgcttattacactatggagattggagaaaccttttcccaaaagatactcaatctcaattagccagagtacgaattgacatctctaatgaagcggattctgattggcacgttgatgttaagaagtcaatggttacaatacccgaacaagccataaaaatcttacgtccaattgccaaagaagcaagagatatctctagagagatatcttacttcaggacacagtcttcaatagctggaagcaaaattaaaggcagcttaaatacttgggaacagtctgggaaagattcagaatccccttttgttttaaataaaagtcatccaatttatttagagttattaaagatgttgaatgaagaacaagcgcgaatgctgaacttttttttgaaattaattgaaataggttcacctgtaaatattatagcagtaccacaattagaagatgaaattcaaaattttacagaccaacagttagaaatggttcatcgctttgctgaaacaatgactcaacttggccttttaaatacaaaaaaagaaattatcgaagcactaatgactcaacctggttttgagatgtttaataaaagcacactgaaatatattctagaaaaggagagcaaagaatgaatataaatttcaacttattggattttcatttccagacaattcactccagtatggaagctcacggccataatcgagatcaagctgcggaagaagcttttgattatgccttaaacattcttaatataaaagaaatctctcaaactgagagagaaaaagcaaaagcaaaaatctttttcaaatataaaattgggatggagttgccaaataaaattagtgtgttagacggaaaaaacagagataactggtattcaccatcaaagaaagcaactttttacttttggaatcgatatagaagatatttgctcgataaaaaacaatgggattttgaaactgtggattctattgataaatcaactgataagatactagaattcctcggtaatcctgagaacccaaatccttttgacaaaagagggctggttttaggatatgttcaatcaggaaaaactgcaaattttacaggtcttataaataaagcatttgatgtcggttataaattaatcattgtcctcgcaggaattcataacgatctgcggactcagacccaaataagattagaagaagaagttgttggtaatcgtacagataagagcgggtgcccagttggcgtagctgaaatcagaccaaataatgatgatcatattattggaacatggactaccgaaaagcatgatatatctgctcgcacaacccctcaagtgtcccatctgaataagccaactttaatggtcgttaagaaaaacaagtcagtattggaaacacttattgaacaattaatcaatcatagaagactttatcaattagatataccggtcttaataattgatgatgaagcagaccaagcctcaattgatacggcggacaagataaaagaagaagaaccaaaaacaattaataaattaattagacagctattagatatttttccacgcagaaattatgtcggttatactgctactccttttgcaaacttgttaatcgatgtaacttctgaaacagaggctgaaggcaaggatctttatcctaaagattttctaattggtctgccaaaaccaacaggatattgtgggcctgaagagttttttaacactgaagaaaactctaattatagtaaacctagtttaattaagtatttagatagtgatgaagagaaactcattgggtcaataaaaaaagtggacgacttagaaatatttgattccgttccaagtcaaatgaaaaaagcgattttatcctttttaatcactattgcgataagaaatctaagaggccagaaaaaaaagcataattcaatgctcatccatatctccagattaaagggtgttcaaacctatattaaagatgtaatcgctgaagaattcgcgtcttatacagattctatactttatgaccaatacagtcctataatagatgaacttaaatttatttatgatcatgaaataactaaaacaacggaagaatgggataacagtatcaagacctttgaatggaacactgtattaaaagagataaaaaaaagcattataacagtacaattatttgcaattaatggcgacagtagcgatgctttagattatcacagctataaagaagacgggctaaatgttattgcaattggaggagacaaactttcaaggggccttacccttgaaggattaagcattacatactatacacgcaatactcttatgtatgatacattaatgcaaatgggccgttggtttggttatcgagaaggttatatagacctttgccggatttatacatcaaagacaatagcaaaccattttgaacatctggctattgctatgcaaaagttgcgtgaggaacttgattatatggcagaaaaaaacaaaacgccaatgcaatatgcagtacgcatgttaagtcatgaaacaatgagattaacaagtttattaaaaatgaaaatggcgactaattataatgctcgttttgatgcaagtctgcagcagacaagagtttttaatgcttctgaaactttctttcgcaataacatgaaggctgtgtcagatcttgtttctaaccttactttttctacaattcagagaaaaaagtctttatatcacctagctaaaaatgtgaatatacatactatattgaaattctttcaaaagtaccaaactagtgagcatgcaacaatagttaaatcaaatttactatcaaattatatagcccttgccaataaagaaaataatgaactggaaaattggacagtagcagtatttgaaggtcaaatgtcaaatcatattgtacctaaccatcctgttaaattaggaagtttatatctatcaaataccgttatgcgtggagagaaagcacatgaatacaataaatccagagagctagtagatatacgggcaattgtagcagataaccaagaatttctagatttggatgaaaaaaacttgtcacctcgaaatcaaagaggaaaatgcgtgaagaaagagacaaaactcaaggctttcttatgatttatcctttaaatccaaacgtaaaaatatttagtgatttagaaataaaatttagcgaagaactcgtaccgataggagttgccctttcttttcccgggactaatattgaaaatgataaagtctatcaaataaacagcacggtaccgcaggttcaaggagaacaaagtggtttcaataaaaaatgaatttacagaaatgtttaatgaatcaatgcatcctgttcagcctgctccattaaaactaaggcttgttttggtcgatcctgttgctgtttttgcaggaatcaatccaagttcagaacaaaggattttatttattactgctggtaaaaaagcatggggaaaagaacaaattatatctttacctaagtggaaaggcatgactattagctttgatttccactttaagattggaccttttgaaaacgaatatgttgtagctatcagccaagaaaaagggtatgacacagatgtatttgtgtctgttttacaaaatattctagaaacaatcactttaaaggctgaaacagaagaattatatcctttattatatcgaactttagataagtggaaagctttcttttctaaaggtgggtataaaaaattaacagaggaacaacaaaaaggacttttcggcgaactttactatataaaaaaatggattgaaaaaaaccctggaattcctccaactttaataaattgctgggaaggtcccttaacaggtcgtttggattttaatatgttacaccactgtattgaaataaaaacagtaacagaaaaaataggtaagaaagtgaagatttccaatgagacgcaactaaccttaacagaggccgtacaatctatatacttgtatgtttgctttattgagaatagccaaacccatggtacatcactcgattcaatggttaatactattagagacttaattgaaagcatgtctcaagaaatattactggtatttaatgaactactgataaaagccggttatcgtgatggggagtatgctgagaatctctttgcaattaacagcgttgaagtctatgatgcaaatgagaattttccccgtattttaccggaatctcttcactctgctgtatctcatgttagttattctatagatttaaaagcttgtgaagagtttttattacaagaaaaccgtgcctacaatacaaaatggagctgaatattaatatgttggaacgacagctagaaagaaattttttaggtaatctattaaatatagtactagaaaaagccgcaaaagaagggaatttccagaatgtttttctaaatgaaatgcttaagtacattgatagcgaaaatgaccctaatattttatatcctccctataaaaatacacataaaaaaattttagtaaatgcttattccaacattaaggaggaaagcaggcttcagttgtatgtagtagattatgatagtgaacaaagtgaagatgagatgctgactataactatgtctgaaataaattctatagctgaaaaagcaaaacgtttctatacaaatgcaaaattgctttttaacaatatagatccgtctcaagaatcccattctctcgcaagaacaattatagagaatgatataaataatattgatattatagttgtaacaaacaggttttacagatcaaataaaatggtcaagttaaacataccgggtattaatgaagtgcatgttcatgtatgggacgtcgaaagagcttatcaactgtactctgccgataatggagatcagctaacttttattgattttaaaagtcagtttgacgaaacttttgagatgatgtatgtaccggacaataaggctaagaattttgaatgttatattggctttatccctgcagaacttttagccaaaattagttgaaagaaacgttcgttccttcctgcaggcacgtgcacaaacaaatagaggaattagagatacactcaaaaatcccgaggagcgtaaaatgtttgtagcctataacaatgggatatcttctgtggccagaagcggagacattgaaaaatctgctgagggcatcaacctctatactataaaagggcttgatgggtggcagattgtaaacggcggacagactacggcttctattcaccgagcttacttggaaggtattgatttaagtgatgtctacatacaaactaaattaacaatattgaaggtaagcagtaaaaatgaagacgagcgaattaaattagaagataacatggttgctaaaatatcggaatttgccaacactcaaaacaaaattaataagtcggatcttctagccaacactcgatttatgtcagagattgaaatgttctccagaagcacatggatacctgtccatgatggacgtaaagcgggtgaaaaatggtattttgaacgtactagaggccaatatatggttgatgttaacagattcaagaaagataaaggatcaaataacttcaaaaaacaaaatccttcagataaagtgctttccaaagtagacctggcaaagtattttatgtcttgggaaggtttccctcacatttcaagtaaaggaggggaagcagcttttaaagaatttatggaacacaattcgctttattggaaaactgaaaaaaatgaagatggtagaaaaagcttaagccttgatgattataaaaaattaatagcgcgagttattattaacatgcgagtacatgaaattgtatctgaacaaaaacttaaagggtatagagctaacgttgtttattattccgtagcaatcctaaaagaaatatatggtgatcaaataagcctaattaaagtttgggaaaaccaaaaattatcagatgtttggaaccctatcattgcaactatcgcgaatgttactttaaattatttaagggattctgctggagaacgaaatgttacacagtgggctaaacaagaagcctgttgggatgaattcaaaaaggaacataagtccacactacaatatctaagatagataacaatttgaaaaactcttttacgtgaggaagatatcaacgaaaaagagtttttttattctaaataacgtctctgattaaactactccactccccaaacagcctccccatcaccgctcagcacactaaacgtcacgacttctttctcccttgctgagtcccattctttcaggaagacgccgtcgtaatttgtgccgttcagtttgatttgggctttgctgctgccggttattgtccaggttccggtcatttccccggaaatggtgccgtcgttgttaaggcggatggtttttggggttttgatcgtagctgtgatgtcttttccgtgctggatgagtttgtaggttccagatgcggcggctgccgatatgtgtgtatccggttcccccgcatagcggtacggggctgcaaccggccagccgtctttgttcatgtacaactgatgcactctaacttcgtgctcctcgcctctgttcgggaaacgggtgtggaaaatgagataggatcgtttcgttttcccgtcgtaaaatacggagttgtgccccggtgagacgtagcctgtgcctttttcagattgtgaggcgaaggtatagctgcccatgagtttgactccgtacggttcaattgctttgtcatcgaagaagctgccgtcttttcctttggcgtcaagcatgttatgacctgcggcgtcataatacgggccgtccggatgtttggagcgggccgcacggatattataaccgcctgacgcgtcaagtccaccgaatgacagatacaaatagtaatatttcgtttccggattgtagctgatatacgggccttcgatccggctgtgatttccgccgagcagtttttttccgtagccttggttcgggagggggaagccggttttcggattcatttccagtatgaaaatcccgccggagtaagagccgtacaccatccaaagcttgcctttatggtcaaaaaacgtttgcgggtctacgacgttcgggtggacgtttgcatgatacgtcgtgccgtcctcgctttttccttccattcccgatttcaaaaagatgcctttgtttttgtagggtccttcgattttgtcactcacggcgacaccgagagcggatcgcggcgagtcccctttacaggcgttgtagtacatgtaaaatttcccgtcagccagctgggcgacgtccggcgcccacagtgtatcagactgggcccagtcgaacgtctcttttaattcactgtagacgttcgggatcagcggattattgttattgacgcttgaagatatttgctgccactgcatcaggtttttcgacttggcggaagccaaatgcgagccgaatacataatacgtatcgcctgttttgatgacggacggatcatggacgctgacctctgaaaaaaccggatgctgggcttttgcctgcggcagggtgaacccgatgaccgctgctgaaatcaggcacacacgaaagaaactggttttcattttctgaaatctcctcgctctcctctttcttaaaatcgctttcaagacaacgttccattttatgacggggatggcgggaatatgtgatcaacagcgccggcttcgtgatgtaccgctttactgcgataacaatctgatttgcaaaagaatggaaaaaaagttttgacttctgattcgcaaacacttaatataaaaaacagttactagttatcagaatatttaagaattgagtgaagcatatatgaccttacacaaagaccgccgcatcgggcgcttgtccgtccttcttctgcttcatgagtctgaagaaagccagcagatcagccggctggaacgggatggctggaaagtctgtctcggcagggtcggttcgatggatgcgcataaagtggtagctgcaattgaaaccgcttccaaaaagagcggtgtcattcaatcagagggttatcgtgaatcacacgcgctttatcatgccacaatggaagctttgcatggagtgacgcggggcgaaatgctgcttggctcgctgcttcgtaccgtcggccttaaatttgccgttttgcggggaaacccttatgaaagcgaggcggaaggcgattggatcgccgtttcactttacggcacgatcggagctccgattaaggggcttgagcacgaaacattcggagtaggaattaatcacatatgaatcagcccatagattttagacgatagggggctatgcgtgaaaaatcattttcatggcatagctcctttttgtatgggcgctttatcaaagtaaagaaaaaggggttgaaatgatggtaacgttagacggttcctcactgacaaccgcagatgcccagcgtgttttatttgattttgaagaggctcaagcatctgctgaaagcatggaaagggtgaaaaaaagcagggctgcggttgaacggattgttcaagaagaaaagaccatttacgggatcacgacggggttcggcaagttcagcgacgtgctgattcaaaaagaagacgccgcggatctgcagctgaatctgattctttcccacgcgtgcggcgttggtgatccatttcccgaatctgtatcacgggccatgctgcttttacgcgccaatgccttgctgaaaggcttttccggcgtgcggactgagctgattgatcagctgctcgcgtatctcaatcatcgcattcatccggtcatcccgcagcaaggatcactgggggcaagcggagatttggcgccgctttctcatctcgcgctggcgctcatcggtcaaggcgaagtcttttacgaaggaggccggatgccgacggcgcacgctttagaaaaagcaaatcttcagccgatcgtgctgacctctaaggaaggactcgcgctgatcaacggaacacaggccatgaccgcgatggggctgatcgcttacctcgaggcggaaaagctggcctatcagtcagaacggattgcgagcttaacgatcgaagggcttcaaggcatcatggatgcgtttgacgaagatattcatgccgcccgcggctatcaggagcaaatggatgttgcagaacgaatccgctattacctgtctgacagcaaactgacgactgtccaaggagagctgcgtgtccaggacgcctattcgatccgctgtattcctcaagtccatggcgcatcgtggcagacattagcgtatgtaaaagaaaaattagaaatcgagatgaatgctgcgacggataacccgctcattttcgaggagggcgccaaaatcatctctggcggaaactttcacggacagccgatcgcctttgccatggattttctcaaagttgcggctgccgagcttgcgaatatttctgaacggcgtatcgaacggcttgtgaatccgcagctgaatgacctgccgccctttctgagccctcagcccggcttacagtccggagcgatgatcatgcaatatgcggcggcctccctcgtgtcggaaaataaaaccctggcccatcccgccagtgtcgattcgatcccttcgtcggcaaaccaggaggatcacgtcagcatgggaaccatcgcatcaagacacgcctaccagatcatcgcgaatacgagacgggtgcttgccgttgaagccatttgcgcgctgcaagccgtggaataccgtggcgcagaacattgcgcttcgtacacaaagcagctctatctcgaaatgagaaacatcgttccgtccatacaagaagaccgcgtgttttcttatgatatcgagcatctgagtgactggctgaagaaggagtcttttctgccgaatgagcatcaccaaaaactgatgaccaatgaagggggacttacaagatgactgaagtaaagaaatcaatccgcgccagccgcggcaccgaacttgaatgcttaggatgggaacaggaagctgtgctccgcatgctccgaaacaaccttgacccggaggttgccgaaaagccggaggatctgatcgtatacggcggcataggcaaggccgcgcgaaactgggatgcttttcacgcaattgagcgctccctcaaaacgttaaaagatgatgaaacactgctgattcaatccgggaaaccggtcggactgttccgcacgcacagccgcgcgccccgcgtccttttggccaattcggttctcgtgccgaaatgggcggattgggagcatttccatgaccttgagaaaaaagggctgatgatgtacgggcaaatgacggccggcagctggatttatatcggctcccaaggtattttgcagggcacttatgaaacctttgcagaacttgcgagacagcatttcggcggcagtctgaaaggaaccgttacgctgacggccggacttggcggaatgggcggcgcacagccgctgtccgtcacgatgaatgatggcgtcgtcatcgccgttgaagcggatgaaaaacggatcgataagcggattgagacaaactattgcgaccggaaaacggcgtccattgacgaagcgctgcgctgggccgagtcagccaaacaagccggaaagcctttgtccatcggccttctcggcaatgcggcagaggtgcatcatgagcttttgaaccgcggagtccatattgacatcgtgaccgatcagacttccgcccatgacccgctgatcggctatattccggccggatactcacttgaagaggccgaccgtctgcgccgggagcagcctgaattatacgtgaggctttctaaacagagtatgaaaaagcatgtggaagccatgcttgctttcaagaaaaaaggggccatcgtctttgattacggcaacaatatccgccaggctgccaaagatgaaggcctcgccgatgcttttgattttccgggattcgtccccgcctacatccggcctttattttgtgaaggaaaaggtccgttccgctgggccgcgctgtccggagaccctgaagatatttaccgcacggacgctttgttaaaagagctgtttcctgaaaataaggctcttcaccgctggattgacatggcgcagaaaaaagttacattccaaggcctgccgtcccggatttgctggctcggctacggcgaatgggaaaagatgggcctcgccatcaatgaattggtcagaaacggcgagctgaaagccccgatcgtcatcggaagagaccatttggactgcggatcagtcgcctccccgaaccgtgaaacagaagcgatgaaagacggaagtgacgcggtcggcgattgggcggtgctgaacgcgcttgtcaacacggcatcaggcgcaagctgggtttctttccaccacggcgggggcgtcggcatggggtattcccttcacgcgggaatggttgcggtcgctgacggctcccagcttgcggaagaacggcttgcccgcgttctgacaagcgatccgggaatgggtattatccgccatgcggacgcgggatatgaaaaagcggctcaagtcgccgaggaacaagacattatgataccgatgaaaaaggagcggtaacatgccgaaacagattgatacgattctcaccaacatcggccagctgttaacgatggaatccggcggcccccgcgcaggcggaagcatgcaggatcttcaagtcacggaagatgccgttatcggcattcacgacgggcacattgtttttgccggacataaaggagcggaggaaggatacgaggcaagagacatgatcgactgtgggggaaggctcgtcacccccggcctcgtcgatccccatacccatcttgtattcggcggctcccgcgaaaaggaattgaatttaaaaattcagggtatgtcctatttggatattttggcgcaaggcggcggcattttgtcaacggtcacagatacgaaagccgcttccgaagaagaactgattgaaaaagggctttttcacctcggacgcatgctgtcatacggcatcacgacggcggaagtaaaaagcggatacggactcgacaaagacactgaactgaaacagctgaccgcggcgaaaaaactgggtgagcgccagccggtcgaccttgtcacgacctttatgggagcacatgccattccgcctgagtaccggaacagccctgacgaattcctggatcgtatgctgcagcttttacctgaaataaaagaaaaaggcctcgcgcaatttgccgatattttcacggaaacaggcgtctttaccgtcagccagtcgcgggactacctgcaaaaagcggctgaagcgggcttcggcctgaaaatccatgctgatgagattgacccgctcggcggcgcggaattggcggcagagctggacgcagtttcagccgatcatctggtgggggcatctgacgaaggcatccgcaagcttgcagagtccgggacgatcgccgtcctgctgccgggcacaactttctatcttggcaaacacacctatgccagagcccgtgagatgattgatgcgggcgtgcgggtcagtttggcgactgacttcaatccgggcagctcaccgacggaaaacctccagctcatcatgtcgattgccgcacttcatttaaaaatgaccgcagaagaaatctggcacgccgtcaccgttaacgccgcttatgcgatcgggaaaggcgaagaggccggacaaattaaagccggccggctggctgacattgtcatttgggaagcgccgaactatatgtatattccgtatcattacggcgtcaatcatgtgcaccgtgtcatcaagaacggaaagacggtcatttcaagggagggagccgctcttggataagtatccgtttttgcaaaaagccggctcgctcttcaacgaccggcatgtgacaaggatcggcgatgtgacggaagcgtgggcgggccagccgctcaaagggccggctttgatcggcgctccgctttctaagtcgtcaatcagccattccggcgcctgctttgctcccggtgcgatccgcaaggcgctcggcggcatttccgcttattccgcggagctgcgggagcatgtcattgaccatttatacgatgccggcgatattcagattcatgtcaccgatatcgtcaaatctcatgagcacatttatcagaccattcatggcattctggcggaccagcctgactgggtgcccgtcattctcgggggcgacaactccatcagttattccaccatcaaagccattgcggaaacgaaaggaacagcggccgtctttcaattcgacgcccaccacgacgtccgcaacacagaagacggagggccgacaaacggcaccccattccgccggctgttagatgataacatcataagcggccaaaacctgattcagcttggaatcagagagttcagcaacagcttggcatatgaagaatatgtaaaagatcggcaggcagaagtgcatacaatggaaatgatccgggagaaagggcttctccgaacgatacaagacgccttgccggccgttcaaaaaagagcggattccattttcatttcggttgatatggatgtgctggatcaagcccatgcgccaggctgtcctgcgatcggccccggaggcctgtataccgaggaactgcttcaggcggtcagatttttagcgcaggaggctgacatctccggtattgagatcgttgaggttgatccgacacttgattttcgcgatatgacaagccgggcagccgcacacgtgatcttacatgcattaaagggatttaaacagtcacgttaacaggctaccggcgtattctcatgccacgaaaaaagggggagatcacaatggatgttgataaaggcggcagtcaattgaagcgcacgatgaaaagcaggcacttatttatgatttcattagggggcgtcatcggcacggggctttttttgagcacagggtatacgttaagccaggccgggccgggcgggacgatcgccgcctacttaatcggcggcttgatgatgtatcttgtcatgcagtgtctcggagaattgtcagtagccatgcctgtgaccggttcttttcaaacgtatgcgacaacgtttatcgggccgtctacgggctttatggtcggtatcatgtattgggtgaattgggtggtgacggtaggctcagaatttacagcttcgggtattcttatgcagcgctggtttccccacagcagcgtctggatgtggagcgcgattttcgcggcccttctttttgccgccaatgcattctccgttaaactgtttgcagaaacggagttttggttttccagcgtcaaaatcgttaccatccttttatttatcatcttaggcggcgccgcgatgttcggcctgatttcgttgcacggttcggcggaagctccgatgctgtcaaatttcacctcacacggcggactgtttccgaatggctttcttgcggttttcatcgcaatgatttccgtaagcttcgccttttcagggacggagctgatcggcattaccgcgggtgaaaccgccaatccggaaaaagatattccgcgttcgatccgaaatgtcgcctggagaacggtcatcttttttatcggcgccatttttgtgctgtccggactgatctcatggaaggaagcaggtgtgattgaaagcccgtttgtcgcggtcttttctcagatcggaatcccttacgccgcggatatcatgaacttcgtgattttaacggctttgctttctgtcgccaattctggactgtacgcttccacccggatgctgtggtcacttgctaatgaaaacatgatcagcgcccggttcaaaaaagtcacgcctaaaggcattccgctgaacgccttgctcgccagcatggccgtttcctgcatatccttgatctcaagcatcgccgccccgggaacggtctacgtggtgcttgtggcaatagccggatttgcaggcgtcgtggtgtggatgagcatcgccctgtctcagctgttatttcgaaaacattatgtaaaaaacggcggccgtctcacggatctgaccttccgcacgccgttataccctctcgttccgatcgctgccatgatcttgtgtttcgcttcatgcgtaggccttgcatttgatcccaatcaaagaatcgccctcttctgcggagttccatgtatgatcttgtgctacctcattcgttttttgagaagaaaacagccgaaacagcccgtccgtgacattcatttggataaaaccatgccataaaaaaggcacatactgatgaggtatgtgcctttcttttcttattccgtaatcagcgtatgaatcagcttcggcgcttccgctttttctgagatgcggatgttgtcatagactttggaggtcacgtcgtcaacgttttcgcggttggcgtaaagggtgacgagcggctctcctttttcgactttgtcaccgacttttttgcggagcatgataccgacggcaaggtcgatttcgtcctcttttgtcgcacgtcccgcgcctaacagcatcgctgcgacgccgatttcgtcagcgacgatttctgaaacgacacccgcttcttttgccgggacgtcaattttgtacgccgcctgcggaagtttggacggatcgtcaacgacggaagcgtcccctccctgattgctcaggaactctttgaacttttcaagcgctttgccgtttttcatgacttcctgcagcttcgttctcgcttcttccaatgtctcggcttttttcgccagaacgaccatttgactgccgagcgtgaggacgagttcgtttaagtcttcagggccttcccctcttaacgtatcaatggcttcttgaacttccaaggcgtttccgatcgcaaaaccgagcggctgcgacatgtcagaaataacagccatcgtttggcggccgacgttgtttccgatacggaccattgctttggcgaggttcacggcgtcttcatccgtcttcataaacgcgccggctcccgttttgacgtcaagcacgatggcatctgctccggcagcgatttttttactcataattgagcttgcgatcagcgggatggagtttaccgtacccgttacatcacgaagggcatacagctttttatcggcgggcgtcaagttgccgctttgtccgatgacggctaccttgtcacggttcactagcttgatgaattcatcttttgacaattccacgtgaaagccttcgatcgcttccagtttatcaatggttcctcccgtatggccaaggccgcggccggacattttagcgacgggaacgccgagcgccgcgacaagcggtgcgagtacgagagttgttgtgtcgccgactccgcccgtagagtgtttgtcgaccttaatgccctcgatggcggagagatcaatcgtttcccctgaattcaccatcgccattgtcagatcggcgcgctcctgatccgtcatatcctgaaagtaaatcgccatagccagcgcgcttgcctgataatcaggaatgcttccgtccgtatatccctttacaaaaaattgaatttcttctgttgtcagttctttaccgttttgtttttttacaataagatctaccattctcatgatatatcacctgtccttcaattatgttcagtgaatcaatcccacgatcgccgctgtcaggaagctgacgagcgttgccccgtacagcagcttcagcccgaaccgcgcgacgacgtttccttgtttttcatgcagccctttcaccgcacccgtaatgattccgatagaagagaaattcgcaaatgagacaaggaatacagataccactgcctgagtatgcgcactgaaatggaaatcgccggatgagagcgtctgcatcgccacaaattcattcgataccattttcgtcgccataatgcttccggcactcaccgcttcattccacggaataccggttaaaaacgcgaatggcgcaaatacatagccgagcagcgcctggaatgtaatgccgaagaccgcgttaaaaacgccattgaccagggcaatgagtgcgacaaatccgatcagcatcgccgctacgacaacggcgactctgaatccatccattatatactcaccgagcacttcgaaaaaggattgtttttcttcttcaggaacaacgatcaaatcctcatctttgctgacggtgtacgggttgatgatagaagcaatgataaatccgccgaataagttcagcacaagcgccgtcacgacgtattcaggcttcagcatcatcatgtaagaaccgacgattgacattgagaccgtcgacattgcggatgcgcaaagcgtgtataagcgctgttcagtaagatagccgagctgttttttcaagctgataaaaacttccgactgacccaaaatcgcggatgcgacagcgttgtaagattcgattttccccattccgttcaccttgcttaatgcaagaccgatatacttcgtgatgaaagggagaaccttccaatgctgcaatattccgattaaagcggatataaagacgatcggcaggagcacgctcatgaagaatgtcgtctgtttcgcattcacaagtccgccgaatacaaagttaatcccttctgatgcatattccagcaagtagttaaatcctttggcaaatccgccgacaagaaaattcccgatcccggtattgaggagaatgtaaccgagaatcagctgcaaaacgagcatgacggcgatcggccggattctgattctttttttgccgttgctggcgagccaggcaagacctaaaaacacaatgattccgataattccgatgaaatacttcatatgtgttctccttttgtttgtattcgcttacaattttttatgcatcaacaaagaaagaggattgcggaagctttcggcttccgcactgctgcttaatagtcgctgctgccgctgtctccgccgctcacgatagagacgccggcgcttgcgccgatccggcttgcgcccgcagcaatcatgctgtcaacatcagcttttgttctgatgccgcctgatgctttgaccccgatgtccggtccgactgtttttctcataagagcgatatcttcagccgttgccccgcctgtagagaaaccggtagacgttttgacgaagtctgcgcccgcggataccgctaagcggcatgcgcgctctttttcttcatctgtcaaaagacatgtttcaatgatcactttgacgagcgcttttttatcggctgcttcaaccaccgcgcggatatcagcctcaaccgcttcatcatcgccgtcttttaatgcgccgatattgatgaccatgtcaacctcagtggctccttttgagatggcatccttcgtttcaaatgcttttgtttccgaagtcgttgcgccgagaggaaacccgataacggtgcaaacgtcaactcccgtacccttcagctcctccgctgcgagtttgacccaagtcgggttcacacaaacggaagcgaatttatattcttttgcttcttttatcagttgtaatatatccgctttttgtgtatgcggtttcaaagcagtatggtctatttgacttgcaattgacattgtatgcacttcctttttcctaggatacgtttagaataaccgaattttgaacatatgtaaattggtaattgaaattatgttcattaattgtcacaattcttgaacgagtttcttggccgtatgctgatcggtaatcaacacgtttgcgtatttacctgtcagggcaccgtgaatggccttgcattttctgctgccgcccgccaccaaaatggaacgctctttcattttcaagtcgctgagctccactccgatggtccggccgttaatgctgctgctgcaaatcctgccttccgcgtcaaaaaagcgcgaacaaatatcgccgactccgcgcgctttcagcaattgtttttcttcttcccggaaatagccgagtctgaaaagcagcgcctcatcccggacggttcccaccgtaaacagggcgatattggcttgtctgcccatttcaatgatccgcttaatatgtctgtcccgctcgaccatctgtttcacatcggcgctgtcaaatataacaggcagcggcaaatacctcggcatggtctgaaatgcttcggcgaacagctgaattgtctcagacgaatacgtattgacgttggaatggctgatgccgcctttcagctgcacgacttcaacgctctttacctgcttcggttccatacggcttgcgatctggtacatcgtcgtcccccagcttacgccgagtatatcgccgtcctttacggttttatgcatatagtctgcgccatagcggcttaagtaatgtgtaatggccgggtaatcgtcacttggagaaaagacgacgtgcgcctcaagcagcccgtatttttcttccagcttcgcgccgagttcatccaaatcctcaaacggatccatgacgcgaatttggacatatcctttttcctttgcgtactgaagcagccttgaaacggtggggcgtgacagattaagccgctcggcgatctgctgctggctgtaatctgattgataatataattttgccgcttctatgctgagctgctgtttttcacgatccatatcgcgcctcccctctccgcttatcatatcaccaaaacacacggtaaaaaagcaccctctgatggggtgcctattttttcagcacaagctcctgaatcgcatgcgctacgccgtgttcgttgtttgattttgtttcaaaatttgcaatgtcccttacttccgggatggcattggccattgccacaccgcagccggcccactgaatcatggacatgtcgttgccgttatcgccgattgccatgacatctttttgttcaatgccaagtttttcagccagcagcttgaccgcgtttcctttactcacttcagggtgaagaatctcatggaagaacggcgcgcttttgaccattgtgtatttttccttgaatgattccggaatggaagcgatcgttttctccagcttgtccggatcgtcgatgaacatgattttcggaatgagaatatccttcggcacctcatcgatcgtgcggaaatgaagcggcacttttgtaatgtatgattcgtataccgtgtattcactgatatcccggttcggcgtgtacagattggctgtgtcaaagtaatgcatcggggtatccagctgtaagctcagctcgtgaagcgcctctaaatcttcaaagcctaatgactgctcggccacgacaccgtttgtatacgtattttggacgagggcgccgttataagcaatcacaaagtcgccttcttcctgtaaattcagctcttccaaataccgccgcacgccgccgatcggccgtcccgtgcacaggacgatattgaccccttccgctttggcggcatcaagcgccccgcggacttcagccgttacttcatgatgatcgtttaatagtgttccgtccatatctattgcgattaacttgtacatcctgcatctcctttgtgatccttttcttcttatactttcatcatatcgttttttcttttcaatgaaaaatcaaacggacggatttctccgccttctcttcatataccgggcttgtttccggatacgcggccgtcttttcctcttgtcggcttgttcgccgttctctgttttctgctttaagagaatcagccccgccgcaaagaaagggacagccgctatgtccagaagggcaagctttattcccatcgctgcgggaaagtatgcccacaatgaacggctgttccgtctgatcatgatatatgaaacgatttctaacaggataaacagagcgttcacccataagtaaatgagcagtgccgcgaataaaaacagcagcagcgtattccgcagcgtgccggaaaacagaagagcgcgcatcatatcaaagaatgaaaatgactgcatgctgccgtttacgacattgggattataaatagtaaaatgcccaaactggtctaaaagcataaagaataaccataacactgaaaaccattgaatgatatgtacgatgacacccgtcaaaacgagtctgtcggcagccttatttcgcatgtgcatcctccccgccggtttttattcttgtcattgtttttgttcctccgtatatcttccaaatgagcgtattattttttcctcttttcaacgtgcttttgacgggatgcggatgtccgaggtattcaatttcgatcgttccgtccgtgttttgtgatatcaccttgtaagcatctgagggcatgtcaacctcgccgcggcctttgatgacctgctttgtcaggactctgtctttcgtaaacgtgacggtttcagatctgaccccgtccatcggtcccggctcaagccctgcatcccatgtcccgtaataaaaaggggtatcgtctgctttctttagctggcagcccgtcatcatgacgcatccgaaaacaagaatcggcatgataaaaatccgtatattccgcaacatgatcaccttccttcgaagcttttttacgcctgtaagttaggcgggtgccgtggcactgtgcaattgactacatagtgtataaagacttcactagataaggagaatgatgaatgaacccatatcagtactatacccctcctgcctatttccctcagcagcaggaattcgaagtgaaccgtgttgagtatgagccgtatcagcaggaagcttattatgcgccctaccagcctgaagaccggcagccgacggctttagaacggagagtcgcccagcttgaaagacaaaacgctgagcaaacgagagagctcacccgtctctcaaatgaagaccagcgccaaaaccgggaaatcacacggatgagcgagcaggtcagacggctgagccaggcaattgagatccattcccgccgcttaaaccgcttgaatcagcgcctgcgcgcggttgaaaacagactcaatatcccttttcacgctacagaaggcggcttctgagaaaaagggccggaatacaaagctcgacaggccattcccgagccttgtattccgctctgtacataacaggtaaatatttgaatcccctgcttgcatgaatgcctcccacattctttcacatgataaatatgtaaaatcaatcattccaggaggttttcatgatgtaccaaaaccaatacagcggaaatcagctccagcaatgccgccagacagcacagcagctgattcagcagacacagcaaagcagccagcagtacaagcaaatgcttcagcaggaacagcaaaatattcaaatgcttcagcagatgcttaaccatgagcagcatgccgttcataccattcagcaagcgcttcaggggcatgaaatggccattcaaaaatgtcagcagatcgtgaatgtgtgcaatcagctgcagcaggacgtaagcggacacatgccttcaccgatgacaaacacgaatgtttcttcattcccgcaaacccagcatcacacaccgttccaacagcattcataccagcagtagcccgatcatgcaaatgacaaagcgcaaggatatcggctttgtcatttgtttttatcgttgttttgtcagatcaatgcgatgagcgggctttctgccgaattttgcttccgcctcatgtcttaccgcttcatacgctcttgcttcgacattttgtttaaacacatcaagctgtatcaaataagccgcccgcaccttcagaccgtggatgatggagatgacccataaaggcagcacgatatacacgccgggtgtgctcggcagcacaaaagcaattgctaaaataataaaatagataagaccgtatttcagccattttttgttcttggcccggtagccgatatagaaaaaggccaagaaagcggtgagcgcaaatggtacgagagtcagcagcagccaccagctgtgcagcacttcccaccagttccctcttttcgtaatcaacattcatccctcctttactactataacatggataatcaaggaaggttttctataaaaaacatagacggaatgaggtcttcctgctatattaataatgataatcattatcatttaatgagggggatcatgatgaagaaacaatcatggctgatcggcctggcacttctgctcgtttttgccttaagcgcctgcagcggcgcgaaggaaaacagcggatcagcatcaggtaaagagaagacagacatgcgtacatatcaatcggcaaaaggaaatattgatatacccgcacacccgaagcggatcgtcactgacttttatgcgggtgagctgctgtccgttgacgcaaatgtcgtcggggcgggctcatgggctttcaaaaatccgtttatcaaaacacagctgaaacacatcacggacgtcggcaatcccgtcaatgtggagaaagtgatgcagctgaagccagatttaatcgtactgatgaaggatgaccaatacgagaaactatcgaaaatcgcgccaacgattgtcattccttttaacaccgcaaaaaatacgaaagatacggtcagcctattcggtgacattaccggagcgaaggataaagccaaaagctttatggcagacttcaacaaaaaagctgaagccgatcgaaagcggctcaaagatgtgatcggcaaagatacgacagtcggcctttatgaaacgacggacaaaggcgagatctggattttcaatgacaattccggccgcggcggccaggccgtttataacgcgctcggattaaaagcgccggctaaaattgaaaaagacatcatcaaatcgggtgccatgaaacagatttctcaagaggtcatccctcaatatgcggctgattatatgttcattaccgattacaatccgaacggagaaagcaaaacgtttgagcgtcttaaagagtcatccgtttggaaaaatctcgacgccgtgaagaacaatcgtgtctttatcaacgactatcacaccttctatccgtatgacccgattgccgtcagcaaacagatggatatcatcaccgacatgctgatcaaacgggctgaagaaaataaaaaataagaaaacggcacagttataacactgtgccgttttgtatgattcattttaattttgactgtacggagtccggcatatcttcaaacctgacttcttcccaggtctcgacatactttcctttcgccttcaccttcaaatacgcgttcttccgaagttctttaccggcgaaaaaggtcacttcctctttttttccggacgcattatatccgtctaatgtatactcagtaccgcccgggctaagatgtttaccatctcggtcaatctgtacatagacatcttgctggtgaataagcggattaaatctgtctgtaacatcgttatgaaaaaagagaagcccgtatataacggcagcggccgccacgacggccaggattgccaatgctttcttcatctttgcactccccttacttgttcatttttttcaaatagctcgaccgcaccgcgaggaagaacagaagctgaaaaatgaaaaatcctccgatggtaagactgagcggtcccgctatatcggaatacccttccacagccattgttctcaaggcaaacagcgtatgcatgacggcaatgacaaatggaaagaagaagagaatcgccagttgtatcgtcacgctttgtgacatttcacgctcactcagaccgattttggccagtgaacggtagcgctcccggtcctcatccaaatcggtgaacagcctgaaatataagaagcttgctgctgcgacgaagaagacgatcgcgataaacaggccgatgaataaactcagactcggcagctgcaccgtatcatagtaggttccggcttttgacgcaaaatcagaatgcacgtcgatatagttgccgtaaatttcatttttcaaggattggctgaactcaagactgtctttccaatgatcatagctgtagccgtataatgacgctttatcaccgagtgatttgagctgatcaaaggtttgatcgttcaccgcgatgatggcattcaatgaaatcagcggttttttgacttcttttaccgacagtttttggtcagacggctcgcctttttggttcagcagcttcagctgatccggggctacgtttttgagattgcggtcatacgtgcccgggaagtagacagcctcatcatttttcaggccgttcagcttgacatggaagtattttgacacgtccgatttactgatcatgtatacaggcggaacagtatctccttcctgatagcgaatataggaaacatctattttatctttcttatacgcaaagccgtgtgttttcagttcatggtcaatatctttcaaatgagtctgttcttttggattgtcactgtaagaaatatactccatctcataggctgactcttccgccccgacggtcgctttgtacatcgcgagcacgcccgtcgccgtaaacgcaaccgcggaaataatgctgacaataaagaacaggcgggcgttgtcttttaaacgatagacaagatcagaaacccaaatgacatttttcccgcgcagataaaaggctttccatttcttcagcgcgcgcagaatccagatgctgctttggctgaaaaagaaatacgtgccgataacggtaagcagtaaaatgatgaacggttctgtaccgtggacattgcctttaagaaccatgccgtacccgccgcacaggcaggcgatgccgaataaggacaaaagaacggacggcttcggttccggcttgatcttatcagtgccctttattaatttgataaccgtatttgatctgacaaaaaggatcgtgaactgcgataaaaggaaaaataaaagcagaaatcctccggccgtaatgccgagcgctttccaaggcatgtacaggggcagcgcgtccatttctaaaatataagcgccgaccgtaaagaacgttttcgaaaaaatgacgccgccgataatgccggccgcaatcgacatgacgccgatgatcatattttccgcagtaatgagctttctcagctgccccggcgtaatgccctgcataagcaggatgccgaattctttatttctcgatttcaaaaatgcattaaccgaatacagaacaaataagaaagaaaaaacaaagatcatccattccgcggcggttaagccttttctggcaatgttattcaagtagccttcctttaaagccggatgaaacaggaacatcgcaaaggtaaagaaaatcaaaacggaaaaggcgctgcttaaaaagaatgcaagataggcccttttgtttctcgtgacgttgttataagcgaactgaagaaaggtcatttgcgtttccccccagcatagacagcacatcaagaatttgttcataaaatacttggcggttttccccgcggtaaatctcattaaacagttcgccgtcttttataaaaatgacgcggcggcagtagcttgccgcaacagggtcgtgggtcaccatcaaagccgtgacatgatcatcctgattcaggctctgcatcgtttccatgacgtcttttgacgctttggaatcaaggtttcccgtcggttcatcagccagaatgagtgacggcttatgaatgaccgctcttgcgatggcggcccgctggcgctggcctccggatacttcaaacgtccgtttgctgaggaggttttcgattccgagcttttccgcgatggcgtgcagtttttcttccattacagacggcggttctttttcaagcgttaacggcagcatgatattttcaccgattgtcagtgtgtccagaaggttgaaatcctgaaacacaaatccgagctgcttgcggcggaaatgagcgagctttgtccgcttcagccgatgcgggttttctccgtgaatcaggatatcgcctgaatccggacggtcgattgttgaaatgatattcaaaagcgttgttttgccggagccggacggccccatcaccgccgtgaattcgccttcttctattgaaaatgaaatttgttttaaggcttgataggacacttgtcctttataggttttatttatatgtttgacttcaagcatattcgccatgagaatcctccttatggttttattcttcttgatctcagctgctttcatgtaatgtcggggcgttcaacacaaaaaatccccttgacgtaaatccatgttatcaaggggaaacagaatgagctatgttgttttcttaacgcagccttacatttttgtaagaaatgaaaatcgaaccgatgtcccttcacccggggacgaactgatgtccaccgtatgattgagcttgcccgtaatttctttgacgagatggaggccgattcccgtagattcttggaaacgccgcccgttttcgccggtgtaataaggatcaaacacccgcttgatgtcctgtgaaggaatgccgacaccgtaatctttgacttcaagcaccgtcctgtcttcatcgcggaagacattcagctcaagtctgtcactcttgcccgccgaatacttaaccgcatttgtgacaacttggccgatcgcgaatttgagccattttgcatcggtataaatctgatgatcatcgcgaatattcattttcggatagacgcggtattgaataaaaaatcgtttatagctttgaatgactgattggagaagctcggataacgaaaccgcttcgattttaaaatcccgttcaaacagatcaagccttgatgaatataaaagcgtctccagcccgtattcaatctgccggacttcttttttaatttgttcaaaaacgggttcatcctcttcctgaatgattaaattaatgaccgacagcggcgtctttacttggtgcacccattgattcatatacgtcacccgcgcgtcgagcttggcttcggtctcatggagcttctggtgctgcagccgtatcagctccatctgcttttcatacagctctgaacaaaactctgaagaaccgagatgcgggatgtccgtcccttcctgtcccgagctgagccaaagataaacaccgctgtctttgtaccagcgataggcaagatagcccgccaaaataagaagctgcacgcccaatatgtaaaacaggtgagagaaagaatgaagacccgcaaaccagtaataaaagaagacaaacagcccttgaaggagaaaaagcagaatcagcactgcatgagaccggagaaacagcttcatgacagcgccctcagctggtagccttcgccccgcaccgattcaattgatacaggcgcattcagctcccgcagtttttttctgagccgcgtgatatacacgttaagtgtattatcatcgacgaaaatatcggtgtcccatgttttttccatgagccggtctcttcccgtcaccttttctccccgctccagcagcacttccaagagcttgctttcttttttagaaagctcgcttttttcatcctgaaagcgcagttcaaaccgttccacaaagagctgcacaccggcatattcaagcactttctccccctgctttgcggcgtactccccgtacgccctgcggatctggcttttgattttcgccagcacaatatcataggaaaacggtttttcgatataatcatctccgccgttttcaatcgccatcacctgatccatttctccgcttctggctgaaataaaaatgatcgggcttgtggagtgctgacggatctggcggcaccaataatagccgtcataggacggcagattgatatcaagcagcaccacatcaggcttttcctgtaaaaaaacatcaagaacagccgtaaaatccgcggccgccacggtttgatatccgtatttttcaagataattccgcaatagtccgcgaatgtcttcactgtcttccacaatcatgattttattcaatctgaaccactcccgtttcttacactgctgccatcatcataatcgtttcaggcgtacggacgcaacaccgcacaaaaaaaccgccattccggcggtttccggtctcatcagccgacctgctgttttacagctttaccggctgatccgaactctctcattttgcttcgcactgtctcttccacggcttcgatgccgggtgtcatatagctgcgcggttcgtacagatcgctttgttcctgaaacatgcggcgtgtttcgtctgtccaggctaccatacattccgtattgatattgatcttcgcgtggccgagcgtgatggctttttggatctgatcctgcggaattccggatgctccgtgaagaacgagaggaatatcagtcatgcgggagatttcctccatttccttaaatccgagtttcggttcaccctgatatttgccgtgtacggagccgagggcggcggccagcgcgtcgatattggctgctttgacgatccgctcacattccgtgatatcggcatatcggactccgccgaccagcccgtcttccatgccgccgaccgtgccgacttcggcttctactgacacgccgtgctttgcggcataatcggtgacttcttttgtcattgcgatattctcgtcaatcggcgcatgggagccgtcaatcatcactgagctgaacccggcgtcaatggcctgtctgcagcgttccgcactgcttccgtgatcaagatgaagcacgacgggaacggtaatcgccatttcctccattaacgcgctgaccatggcggcaatcgttttaaatccgcctaaataatcgaccagccgatcagatgccgcggcgatgaccggcgattgctccttttgcgccgcttgcagaatcgcttttgtccattgcaggccgtttatattaaactggccgactgcataatgctcccgtttcgcttccgcaagaagatgtttcatggtgacaaaagccatgttcacgcctccttcatgaagtattttgatacgacggcttccgttgtttcttttgccgttttgatcgtttcctccgcggtcagcttataatattcaggtctgaacagctctacggagacaacatcattgaatccgatttctcttaacgctgacagatgggcgtctaagtcaatcgccccctgccccggccagacgcggtcttcatccgttaaaaaaccgatcgggaaatcttctgtatcgtcaatatgatagatgaaaattttctttccgtccgccttcttcaggctctcaatattggagcccatcgcgtggaaatgaaagctgtcaaacacaagcccgacattatcccggccgacagcgtccacgatgtcatacgcctgttcaaatgtattgaccgtgcattgcgggtggccgacaaattcaagggcgatgtttacgccgtacggctccgcgatatcagaaagctcagtcagcaccttgatgctgctctttttgatctcttcttttaagattttccgctctgtcacaagcggtacggccaccacatatttcacgccgagtgttttgcaggtttccatcatgcttttgaattctgaaatgatctcccgatagcccttttcatcacgattgttgaagaaaaccaatgcgttcagtgcaagcggcttaatgtgatgggtttgaaaatattccgccagatcggccagtgaatggtcttttaagtattccggcagcttatccattgtgcggatttcaatataatcatagccgtgcttttcgcacagctctaaatcctgtttcaggtttgaattctccaacgttgtcgcttcattaaagcaaagtttcatgtcagcctctcccatcgcgttttagatatgaagggagtccggctgaagggctttttggccccgtcccgccgaactccatactcagcttacgccatacctaattcttcttttaatttcttaagcatgaaccggcttgattcatccgctctttctccgacccaagcaaaaacggcattcgtcgcaattccgtcgaacttcatctccctcatctttttgaaaatcgtatcaaaatccacctcgccttgaccgatgtccaaatgctggtgaaccgttactttcgcgtcaggcggattgacgatgtagcgcaggccatgcgccgccttatgattataggtatctgcaaataaaacatgtgtgaggcggtcgccggcttcgtcaaacatggtcgcaatatcgcctttgccgtcatcgtagaagaatgtatgcgcagtcgagtagacaagattgatccaatccttgtcaagcgcgcggatcatatccatcgcacctttgtgcgtctcgataaaatcatacgggtgggcctgcagattgagtttgacgccttctttttcaaagacgggcagcagctcatccatggatttgataaatttttcttcactagttaacggatcatattttgaaccgctgaattcgctgttcatcaaatccacttcaagttcaaccgcaattttgatcgcccgtttccagttgcgcacggctgcctggcggcggtcttcatcagggcctgcccagtggtaaagcggaaggagagaggacagcttcacgcctgtatcctttaaaaggcgcttcaattgtttgatctttgctgaatcgactttcggatatttatagaaaggacaaaaatcctcacgcggtgacagttcgatatattcataaccgagctccgccgttttatagaccatttcttctaacgttaaatcatcacggtacatggatggatccaaggccagtttcatttctttcactcccaatctattatttattcacagtcgtaaatgattgatagaatgccggtttctcttggagcgccacaggctctttccggccggattcctgagcttttacgcacgcgtcagtcgtcacggcggcgatgtaaccgtcccatgccgtcggaccgctgacttcgccttttttccggatcgaatcaatgaagtcttgaatttccacatcatacgcagccacaaatcggcgctgccaatccatcagaatatcggtgctgaatgtcccttcttttctcaagctgatgctggatggttccggaagcttgatgatgccgtcttctccgacgatttcacattgaatatcgtagccgtatttacagttcacatagatttcggcattgatgacgataccgccttttgtttcaataatgaccatctgcggatctttcagatgcggcagcgcattttttgatttcttcggatagatgacctgtacggattcatagtcgtcattgacgagccagtgaaggacatcgatttcatgaacgagcgtatcgacaacggccatgtctgttgaataattcggcgcgaccgtcggattgcggtgcgcacagtgaatcatcagcggctctccgaccacacggttgtcgatcgcttctttcagctgaacataaccgctgtcatatctgcgcatgaagcctacctgcaccaatcggcgtcccgtcttcatttcttcttcgacgatgcgcatacagccttctgccgttgtcgcgagcggcttttcacaaaaaacgtatttgccgcgctgaatcgctttcaaaacgctggactcgtgagccgggccccagcttgtcactaagacggcgtccacattttcagcagcgaggaggctgtcgtcatcaggataaacggaggcgttcaaattgaaatcctgaacggtctgctgtgcagcctcctgattcacatccgttacagcggtaatttccgcgccggacagcttatttgtgatgcggttgatgtgctcttttccgatagcaccggttccgataacccctatacgtaaattcattgatcgccactccttctgataatcaaatgattgttctcgtctttcttttctcgctgccgtcctgaggagcaccgtacagttcctcctgaatctgttcaagcgacttgccggacgtattcggtgcgaagacaagcccgatgaccatactggccgtcacgcatatgagcagaatacctgccataacaccgatgccgaactgtgtcatgataaccggcacaaataaactccaaattccgattgaaatacggaccagaaagaacatgagcccttgtgccgacgccctgtgctccgtcgggaacagctcgcttgcccacagctggtagttcgcctgctggccggctccgttattgatgccgatcgcgaagacaaacaaaagcagaaccggaagcccctgaaacggcagtaaaaacagcgaccagccgacaacagccataaatgcgcagatcccgaacaccgttttccgatattgatccgcaaaaggcatgaagatacaagcgacgccgagcccggtgaaaataaacagggccatctgcagaatgttagccgtatttgcggatacgccgccgacctgctgatagatgtacggcataaagaatcccatgactcccgcggcgagattccatatgagaaacacacccattaaaaacaaaatattcttaaaaaatttcggctgaagcaggtcaaaataagatgtttttttcacggcggcaggccggtcttcactgtttttccaggcatctgattcaggtaaacgctttcttagcgtatatgtgataagggcgatcaccaatagatgcgcaaaaacaattttatttcctaaaagcccaaggtcaccaaccaggaccgataacagcaggaccacaacggctccggcggcccatgccacctgcgccaccccgcaatgcctcgcccggtttttctcaggggcgttttccgcgataatggtccatgacgccgtaatatccgcgcctacagaaatcccgataatcgtgtatccgcataacagcataggaaagttgaatccaaacaaaaccaaacaaattcctaaggcgtaaacgagcatactgtttgtatagaccgctttccgtccgaccttatcagccaaatatccgccaagcagcgctccgatggccgctgatatggcgtttgcactgaaggcgcctagcaatccgatctggctgtcggacagcttcaaatagctgacccacatggataaacccgctgaccctgccacgatggaacctgcatcaatgtaatttgctaatgctgcggcgatggtccttttgctgaaagctgattccgccttggcactattcatataagtccccctctaatttgcaggatcaagcagttctttgtcgatatactttctcgcaatcagcgcgtactcaagcggattggcgactgccgggtcttgttcggcttcaatgacgatccagcctgaataatcatgacggatgagcgttcggtacacttcggtgaaatcgatgcatccgtctccgggaaccgtaaaaatgccctgtaaaaacgactgcctgaatgacttgccttcctttctgcacagctccataatgtcaaaccgcgcatccttgaaatgaacgtgtctgatccgttccatatgcttattcagaatcgtcatgtaatctccgtccgagatataagcatggcctgtatcataaagcaaatggacataccggggatccgtcccttccatcagccggtcaacttctcccgccgtctgaacgcctgtgccgagatgatgatgaaaagtgaggtcaagcccgtgttcttccgcgattttcccaaggcggttcaggccttggcaaagcgtatcccattcttcatctgagaagtgcggttttttcttaaaaacatcaatgtccaacccctgaacactgtacgtctgttcagaaacgatggcgacatcagccccgacttttttcaaataatcacagtgttctgtaaattgttcggctgttttttcaataccgtcttgaatgataaagctgctgaaccattttcccgcaatccgcaagttccggagagccagctccttattcaggacggagggttcagggaaaaaccctcccacttccgtaccttggaagccggcgacaacaatatcgctcaacaaatgctgaagcgtattcccggctccgatttccggcatatcgtcattgcgccatccaatgggggcgatgccccacagaatatcttgtttgcccatcgtgatgcctcccctctagtactgcttcgcagacttcagcttcgtctctttcgcttcgtatgcccgttggacgctttcctgctcagacacttccgccacgccgacatgccaccagctgtcatagccgtctgtcatcgttttcggcagaaccttcatctcaattaacgtggatacgtcctgcgttttcgcatcttcaagcgccgctttcagctcttcaaccgtattggctctgtatgttttggcgccgtatccctctgccaccttcgcgtaatcaatgtttaaaatctgattgtcctctgtgcggaactcacagaaataactgccgctgccgtgatccatttgcaggttgttgatacagccgaatccggagttatcaaaaagcaggacattgatttttttgttatattgaagcgccgtaatcagctctgaatgcagcatcagaaaacttccgtcgccgacgagtgaatagacttctttgtccggatgggccagcttgaggccaagcgtgcctgatacctcatatcccatgcaggaatagccgtactccagatggtacgtattcgggacattggaatgccacagacgctgcaaatctcccggaagagaccccgccgaactgatgacgatactgtcttcaggaatcgtgtcattgatcgtcagaagcgccgttgtttgcggcagctcagtcttgagcgcgtcggcatactcgtttaacacgtcctgtgaaaaatgattcttaatttccggtttgaacgcgtcacgtgtaaaagtgactttgccgagccggtcccgttcagccagccattcatccttccagtctttaatcgccgtgccgaatgcgcttttatatccgtccaataagccgtgcagcctgccgagcgtcactttcgcatcggctacgacctgaaacgcgtcaagcttataagcctgcatgcggctgacattgatattcaagaatgctgctttttcaaaatcaaacgccgttttggaggatgtcgcaaagtccgtgtaccgtgtaccgacaccgatgataagatcagcctggcgggcggctttgtttgcggcaagtgtgcccgtgatgcccatgccgcccagattgttggcgaagtcagcttcaaccgttgacttaccggcctgcgtttccacaagaggaatgccgtatgtttcagaaagcgcgatcaattcctcacgcgcgccggaatacttcgcgccgccgcccactaaaatgacggggcggctgctctctttaattctttccgcggcgcctttcagctcacgctcgctcggctgcatacgatcaatataatgaacgcgtttttcaaagaagctttcatcaaaatcatacgcttctccctctacatcctgagaaatgcagattgtcgccggacccgcttttgccggatccgtcattacttcaaatgcccggattaagctgctcatcagctgctcggggcgggtaatgcggtcccaatagcgtgacacgggctttaacgcatcgtttgtcgtgacggcggcactgtattcctgctccacctgctgaagcaccggatcaggctgcctcgtcgcaaaggtatcggccggaagcagcagcaccggaatattgttagccagagccgtgcccgcggcagccgtcaaatttgcggcacccggcccgaccgatgttgataccgcgtaaatttttcttctcagcatttgcttgctgtatgccatcgcggcatgcgccatgccttgttcgtttttgccttgatagactttcaggtgcccggcgtcctgctcaagcgcctgcccgatccccaacacatttccgtggccgaaaatcgtgaagatgccttcaacgaacggctcttcttttccgtcaatatgaatgtactgccggtttaaaaatttaatcagcgcttgtgctgtcgttaagcgaattgtcttgcccacaaacgatcccaccttttatcgttctatttaccattcagactgtgctgtgcttcaatcagttcgatgatttcatcggcagccggcattgcttctgaggagctgtgtttgctgacgacgatggaagcggaagcgctcccgtattttaatgccgtttcaatatcccggccgctgacaagtccgtagatgaaggcggacgcgtaggaatcacccgctccgaacgtcttcagcacctttgtttgataggcatgcgcccggaagatttctcccgatctgctgtatgcgtatgatccgtcaacgccgtgcttgatgacgataaggtcagcggaatgcgcaaacaaatggcggacggtttcatcgttatttccgccgctgcggttctccatcacgtcaaattcgtcacgcgtcccgatgacgatatcggattgttccgccaccagcgtgtagtacacggctgtttcttctgccgattgccatgtatacgggcgatagtcgagctcaaaaacgacttttacgtcatgtttttttgcggtatgcaccgcttttaagacggcttcgcgcgacgggcttttcgcaagcgccgtcccagaaacgagcagcattttcgcgtttgcgatgtagccttcattgacttcggacggctcaagatacaaatcagccacgtcatcccggtacatgagaatgctgcactcttcaggactgagaatttccgtgaaagcgagtccggctttatgcccgtctctgtcaacgaccatttgtgaggtatcaacgcccttttccttcatataggaaacgatgaatctgccgtgctgatcgtccgggattttgccgataaaaccggcttttaatccgagcttggcgctgccgatcgcaatatttgccggagagccgccgacatatttagaaaacgtcatcgtttcttccatcgggcgattgtattccgccgcgttcaaatcaatacacgcgcgtccgatcgcgacaatatcaaactctctttcttcattaaacgtatatttcatcgttatctgccactcctcacttgttagcgttccagaatccactcatgggccggatcattatgaaacttccatttgcgtgtcggtcccgccattacattcaggtagtaagaggtatacccatccggaacaccaacaggatgatagcccgccggcacgatgacaacgttttcattttctgcggtcatcgtctcgtcaatcgaacggtcgtccgtgtatacacgctggaagacaaagccctgcggcgggtccatttcatggtaataagtttcttctaagaaggattcagccggcagattgtcttggtcatgtttgtgcggcgggtagctcgaccagttgccgctgtccgtgtaaacttcaacaacgagaaggctgtttgccgatggatctgaatcggggagaatgttatgaacggttcgtttgtttgccagcttgccgcgatgttccacaccgttgtcttccgcttttatcagctttgtcggaagctggtgttcggacggagagtagcacagcgcaaccctcgccccgctgacagctgtgatctcaaaagagcggtcattagacacataaacgctgtccgtcggttttctttcaaatacgctttcacgggtgccgatgctttcaaatgtctgttcatgatcagtgacggtgatgtttcccgttaccgcaacaatgcagcactccgtctttttcaaatcttctgtatatgttgagccgggagcgaggtcgacgactttaaatccgacgtatttgaggtctgaattagatgaagtgacttcatgtatgatgttcacgccttgagaaatctcatcggccttcggttttcgcagcaaatgactcatgtttattcctccttaattgatggtaaaaggaaacccggacgtgatatcaaagccgtccgggccggctgtcagatcaattgaaatcaggagacgggtatcgtgccgtcacgacttttttgcgtgtatagaagtcgacgctgtcttttccgtttgcgtgcaatgtgccgaagaaagaagacttccagcccgagaatgggaagaatgccatcggcgccggcacgcctaaattgatgccgagcattcccgcatctatattctcacggaagtagcggattgcgttcgcatttgaagtgaacaggcacgcgccgttcgcaaattcagactggttggcgatgtcaaccgcttcttttaggtttttcacgcggatgaccgacagaacgggcgcaaaaatttcatctttccagatcgtcatatccgtcgtcacgttatcaaaaatcgtcggtccgacgaaatagccgtcttccgttacgttttcacggccgtcacaaaggagtctcgctccttcctcgatgcctttttcaatatagctgtgcgtgcgctttttgttgtcctcgcggatgaccgggcctaagaacacgccgtcatccagtccgtttccgagcttgatgtctgcggccttttcctgcaatttcgccataaactcatcggcgattccctcttcaaccgtcacaaccgcacatgccatgcatcgctcgccagcagaaccgaatgccgcaccgataatatttgtgaccgtatcttcaagatgggcgtcattcagcacgatcgtatggtttttcgcacccgttaacgcctgaacgcgcttcagatgttcgctcccttttttgaagacatactcgccgacaggttttgaaccgacgaatgagatggctttaatatcaggatgctcaagaatgccgtttaccacatcatgcgcgccgtgcacgacattgaagacgccttttggcagcccggcctgttcaaacagctctgccagtttttccgttaacagcggcgtgcgctcagacggcttcagaatgaacgtatttcctaaagaaatcgccatcgggaacatccagcacggaaccatcatcgggaagttgaacggtgcgataccgccgacgaccccgatcggataacggtagttcgccgcttctacatccgttgcgatagaggcgagtgaatcgcccatcatgagtgacggcgcgcccgctgcgaattcaacgttttcaattccgcgtcccacttcgccgagtgcttctgtcgtgtttttaccgttttccaaagtgatcagacgggcaagctcttctttgttctgctggagaagctgctgatagttaaatagaattctcgcacggcgcggcactgccgtctttgaccatgttttaaacgcttccgacgctgaccggacggcgtattccacatcctcccgcgtagaaatcggaacttggcacatcacttcttttgtagccggattgacaacgtcttcatattgatctgtcttactttcaacccattcaccattgatgtagtttttcagttttctgatctctgccattctcattgcctccttaaatagtaaacatcctgttcagccgggtgataacggatgaatatattcatcttttacatacaaaagacatgaattaaacgcttacaaatgctaaaatgatggtgattcccaatcttcccgtgtaaaagttggtcatgtaccggaaaaagcaagcggttacacctttcacttttgattttacaggttatattttggtcatttcttggttacattgtaagcccaacacaccttcaagtcaatctaaaaaatcaaaattttttcattatttttattatactttttttgagccgggaaacaggaacttggagaacgatgtcgaatcgtacgggatgatccatcttttttatcatttgttaagtaactattgattaactcttggtgtttattatatattttaattactttaagaattctagaaggagtttttttatgaaactgatgcggattcaggagatggaagaatacattctcaaacacggagccacttcgctggatgagctgtgcgaggtattcaacgtctctaaaaacacggtcagacgggatattaataagcttgcggaaaaaggggttattaaaaaggtatacggcggtgtgacatcagccgaaaaatctgtgctcgtcccttttgaaaaccgcactattcaacatcaggatgaaaaaatcaaaatcgcccgctatgcgtcacggtttatcgaggatcacgatcttgtgtttattgattccggcacgacgaccaaatcgatgctggagacccttgaccccgataagaatgtgacggttttgacgaacagtcttgatattattaacgccgcttcatccatgaaaaatatcgacctgatcatcatcggcaataactacaagcggaagacaaggtcgtttgtcggcattgatgatccgagcacactcaataaatacaacattaacaaagcgttcatgtccgctaccgggacaacgatcacacatggcctgacgaattccgacttactggaatacgaggtgaaaaagaaaatttctgaaaaggcgaacgaagtgtatctgctcgcggatcattctaaattcggcaaatccacgcttctgacatacgcgcctttcgaccgtcttcacagcatcgtcacttctcagcagcttgatgaggaatatacgaagtattgccaagagcaccaaatcgacattcacttggcatagcgttatagttaatagagtacgctgccgtcattttccggcaggcgctagatattctattgtttcaggaggcgaaaacatgagcaaagtaacaatcggcaaaactgacttaaaggtatttccgatcggtttgggaacaaatgcggtcggcgggcacaatctctatccgaatctgaatgaagaaacgggaaaagaattggttcgtgaagcgattaaaagcggcgttaccatgttagataccgcctatatttacggtgtgggccgttctgaagaattaatcggcgaggtgctgaaagagtttaaccgtgaggatgtcttcatcgccacaaaagccgcgcacaggaaagaaggcgatgacttcgttttcgacaactcactggcctttttgaaacaatcagtcgaagacagcctgaaacgcctgcagactgattacattgatttattctacatccatttcccggatgaggacactccgaaggacgaagccgtgcaagccttgaatgagctgaaaaaagaagggaaaatccgttccatcggcgtctccaatttctctctggagcagctgaaagaagccaataaagacggcttagtcgatgtgattcaaggggaatacaacctgctgaaccgtgaggctgaaaagacgttcttcccttatacgacagaacacaatatttcattcattccgtacttcccgctcgtttccggactgctggccggcaaatacgacgagaacacaaccttccctgaaggcgatctgcgtaatgatcagactcatttccaaggggagcagtttaaagaaaacatcaaaaaagtcaaccagctcaaaccgattgccgaaaagcacaatgctgacacggcgcatatcgtgcttgcctggtatttggcgagacctgaaatcgacatcctgattccgggcgccaaacgcgcggatcaactaaaagacaacatgaaagcagcctccattacgctttctgctgaagaaatcgcgtttatcgacaagctgttttcataagaaaaacacgccttttaaagggcgtgtttttttatgtttatattttttttcacaggggaatgaaatagttatctaaataaactattatgcgttccaaaagatgaggaggatcatctgtgaagaaaaacaccaaaaaatacctgatttactttttcggagcattaggtgggctgctttacggttatgacaccggcgtgatttcaggggctttgctatttatcaacaaagatattcctttgaacacgctgactgagggattggtcgtcagcatgctgctgctcggtgcgattttcgggtccgcgttaagcgggacatgctctgaccgatggggcaggagaaaagtcgttttcgtcctttcactcatatttattttcggtgcgcttgcctgcgcggcttcgcaaaccgtcactatgctgatcatctcccgtgtcattctcgggttagccgtcggcggttcaacggcgcttgttcccgtttatctttctgagatggctccgacgaaaatacgcggaacgctcggcacattgaataacttaatgattgtgaccggaattttactcgcatatattgtgaattacatattcaccccatttgaagcttggcgctggatggtaggtctcgccgcagtaccggcggcgctattattaatcggaatcgcgtttatgccggaatctccgagatggctcgtcaaacgcggccgtgaacaggaagccagaaaagtcatggaaatgacgcacgacaaagaggatatcgccgttgaattggcggagatgaaacaaggagaagccgagaaaaaagaatcgacactcggcttgctgaaagcaaaatggatccgtcctatgctgctgatcggaatcggccttgccatcttccagcaggcggtcggtatcaacacggtaatttactatgcgccgaccatctttacgaaggccggactcggcacttcggcgtccgttctcggcacgatgggcatcggtgttttaaacgtcatcatgtgtatcaccgccatgatcttaattgaccggatcggccggaaaaaactgctgatgtggggaagtgtcggcatcaccttgagcctggcgtcactatcagccattctccttctcgccggcctgtcagcttcaacagcttggctgaccgtcctgtttctcggaatctatatcgtcttttaccaggcgacatggggtcccgtcgtatgggtcctgatgccggagctgttcccgtcaaacgcacgcggagccgcaactggatttacgacattgattctgtcggcaaccaatctggtcgtttcactggtattcccgcttatgctgagcgccatgggcatcggctgggtattcggaattttctcagtcatctgccttacatccttcttcttcgccgcttacatcgttccggaaacgaagggcagaagtttagaagaaatcgaaacgcacttgaaaaaacggttctccttaaagaagcgcagcaaacaaaatcaaattcttaaacagcgcacgctgtaatcaaaaaggaatcgcccccgatgggcgatccctttttggcgtcataccatgactttgcaaatatcattcgtaaattctaccggatcgtggatcggcagcccttcaatcagaagcgcctgattgtagagaaggtttgtgtataacgcaagcttttcccgatcttgtccgtgcgcgttctttaacgtctcaaacacttcgtgattcgggttgatttccagcactttttccgctttgacctgctggctgtcaggcatggcgtttaacactttctccatttcgatcgtcacttcgccgtctgtcgcaaagcataccgggtgggattttaagcgcttcgatgctctgacgttcttcactttatccgcaagaatctctttcatgctttcgaacaggtctttatattcgttttcttcagcttcggtctgcttttcatcttcatcagcgtcgatgcctaagtccgcgcttgatacggatttgaactctttttcctcgtagcttgtcagcattttgatcgcgaattcatcaatatcttccgtgaaatataagatttcgtagcccttgtcggccaccatttcagtttgcggcagcttttcaatccgctcatatgaatcgccggacgcgtaatagatatatttttgatcctcaggcattctggacacatattcatccagtgtgacgagttttttctccttagatgaatagaagagaagcaggtcttttaatacgtctttattcgcgccgaaatcattatagacgccgaatttaagctgtctgccgaaagattcatagaaagattcgtatttttcccttttgttcttcagcaggctcttcagctcagccttgatttttttattgatgtttttcgcaatcagcttcagctggcggtcatgctgcagcatttctctggaaatgttcagcgacagatcctcagaatcgaccatgccttttacaaagctgaaatggtccggaagcaggtcggcgcatttgttcatgatcagcacgccgttggaatacagctccaatcctttttcgaattccttcgtataatagtcaaacggcatgttttccggaataaacaaaatcgaattgtagcgcaccgctccgtctacgctgatatgcacgtgagtcagcggtttatcaaagccgtaatgcttctcagcgtaaaatgcctcgtaatcttcatccgtcagctcgcttttgttttttctccagatcggcaccatgctgttgaccgtctgttcttcctgaacctcttcaaactcgttctcgctgccctctttcggcttgttgaccgtctcttccattttgatcgggtagcggataaaatctgagtactttttcacgatcgctttgatgcggtagttttctaaaaactcatcatagctttcatcttctgtgttttcttttattttcagggtgatttcggttccgacggtttccttgtcacacggcgcgaccgtgtagccggcagccccttccgactcccatacatacgcctcgtcactgccgagcgccttacttttcaccgtgactttatcagccaccataaacgccgcataaaatccgacgccgaactgaccgataatgtcatggccgtctttcgcgtcgttttcttccttgaaagcgagtgaaccgcttttcgcaatcgttccgagatgctgttcaagctcgtcttttgtcattccgataccggtatctgtgacagtgagcgttcttgcttctttgtccgccgtcacttttatgtagtaattgtcttgatcaaatgttaacgaatcatcggttaacgccttgtaatagattttgtcaatcgcatcgctcgcgttggaaattaactctctgagaaaaatttccttctgcgtgtaaatggagttaatcatcatgtccagcaaacgcttggattctgctttaaacttttttttccgcaattcagatctctcctttaattatgctttgatgttatgtaaaatcttttcagcatctatttatcatattcaatgacatctgtcaatctattgcaatatgattgtcggctgagtctttcatattaataatttaacataaaacacaataattggtttgtttttaatcatccggttctatgtttactccttcacataacgggaaaaagtcaaagaaaaaaaggagaatgcagcatgggaagattatccggaaaaaccgcaatcatcacaggggcggcaacaggcatcgggcaggcgacggcacgggttttcgccgatgaaggcgcccgcgtgatctgcggtgacatcaatgaaagcgagctgaatgaaaccgtccgcgccatcacaaaaaacggcggagaagcagaggcttttcaccttgatgtatcagacgaagaaaacgtaaagtcttttgcagacggcattcagcagaagtacggaacaattgatattctttttaacaatgccggtgttgaccaagagggcggcaaagtccatgagtacccggtcgagctgtttgaccggatcatcgccgtcgatctgcgcggcacatttctttgcagcaaatatctgattccgctcatgcttgaaaaaggaggctccatcatcaacacctcctccatgtccggccgggccgcagaccttgaccgttcaggctataacgccgcaaaaggcggtatcacgaacctgacaaaagcgatggccattgattacgccagaagcggcatccgcgtcaattccttatcgccgggcacgattgaaacaccgctcattgataaactggcaggcactaaagaagacaaaatgggcgaggctttccgtgaagccaacaaatggatcacgccgctcggccggctcggaaaaccggaagaaatggcggccgtcgcacttttccttgcttcagacgacagctcgtacgtcacaggagaagacatcaccgcagacggcggcatcatggcatacacatggccgggaaaaatgctgattgataagaagtggaaggaagagacggagtgagacgagtggaagaacaagctgagggctggttacttaaaccagcccttttcctttgatcgggttattgcttcaattcgattttttacttctaatttatccagaatcatcgaaacataattgcggactgtgccgcttttgatgctgagggcgtttgcgatttcttttgtgttttttccgtctgcgacgagctcaagcaccgctttttcccgttcggtcagcgggttttcttcaccatagatgtcctccattaattcaggtgcgtagacgcgtcttcctttcatgacgctgcggatggcgctgacgagctcctcgctagggctgtccttgagcatgtaaccgctgacgcctgcttttagcgcccgctgaaaatagccggagcgggcaaaggtcgttaaaatgatgattttcacatcactgtccttgagcttttccgccgcctcaagacctgataccccgggcatttcaatatccatcagacagatgtcaggagcatgtttttccacgaaatcgatggcatcctggccgcttgtgcctttgccgacaaccgtcatatcctcttctaaattcaacagcgaaccgagtgcgccgagcagcatttgctgatcctcggcaatgaagatgttgatcatctgccaccatccttttcttttgattttgaatcattcgggattctcaaggtcagctttgttccggcagctgtatcgatggctaaactgccattcgcgaattcaagccgttctctcattccaagcaggccgtgcccctttgaaaaaaagcggtcttccctgcattggaagctgccgtcgtcttctaccgtaatgacaacctctttcgagagctgctgaatggtaatgcggcaaactttggcgccgctgtgtttcacgacattggtgacagcttcttttatgcacatgctgacgatattttcgttcagcagggaaatattttttggcgcttctttttcttcgtacacaaagtcaattcccgctgcttcaagtatttgccgaacattgccgagctcatccttcaatcggatgcctttcatcgacgagacaatttgtctgacctcatttaaggaggtgcgggccgtctgctgaacgcttttcagctcagcgcgggcctgttcaggatccttgtatatcagcttacgggcaagatcactttttagtccgattaaggagagcttttgtccaagtgtatcgtggaggtctcgggcgatgcgctgcctttcttccagcttcacaagatccgcgatccgttcatttgcatattctaatttctcttcaaggcgttctcgttccttcctgcttcgaatgctgagcgggagcaggatggcactgatcagtgtaatgacgataaacggaatttgagtcagaaaccacccttttttcagaacaaggctgaagttgacggcgatcgccgcactgatgatatgaatgtaatataagatgtaaaaaggaactttctctcggatatgaccgatgaagtaggcgataaagaaggcgaaataaatataactgaacagcatgactgagccggtcgaaataccgatcagaagaaacgcccataaataaagcggccagccttttgcaacaaatgcgaagcgatatgcgccgaagaaaacaagggtgaaaatgacgccggcaaccatcacaaaggtagaagagcttttaaaaataaaataaaaaggcagaatgaaaaaaatcgtccatatataaggagaaatcccgttcagtttttgaaatttaaaatacttcttcatccttatgccaccttctgctgcttatgtctaccatcactttaccaaaacaacgccttcattgcatcctcactcataaagcgacggccctttctgataagagaaagagccgcgcgccatatcaggcatttttctttaaaggtttttccggcgcctgccggggcgacggtgttttccgcgcctcccgaaacgtgacaaactgcttttcgtcctcatcccacagacggaatttcatggattcaagacttgttttaagcgtaatggtcggtacattttttaaaggttcatgcccctcatgagccgcttccagcttgtaattcggcacctttgggcttaaatggtggacatggtggtagccgatattgcctgtcagccattgcaaaagcttcggcagcttataataggagcttccttctacagcggcctgcacatagttccaatgctcatcggcttcaaaataagagtcttcaaacgtatgctgtacataaaagagccagacgccgattgaccccgaaataaggaaaatcggaccttgaacaagcaaaaagttttcccagccgacaagcaggcacgttgcggcagccaatatgacaatagccgcgttcgtgaaatacgtgttccagcgctccttgcggcgggcgccttttacattgaaacggttttgaataagaaatacgtaaatcggcccgagaataaacataataaacggattgcgataaagtctgtagcgtacttttgtccaggctgacgcttctttatattctttgacggtcatcatccaaatatcgccggtgccccgtttatctaaattgctgcttgtcgcatgatgaatggagtggctgcgctgccattgaaggtacggaaacagtgtcagcacacctgaaatgaacccgaacagccggttcagccgcttttgtttgaaaaaggattgatggcagcagtcgtggaaaatgataaatattcttgtcaaaaagcccgctgctataacagtaaaggcgagggtcagaagataggagacattgaggctgaagtaagcaagaaaccaaaggccaaagaacggcacaaacgtattgaaaagctgaatgacactatgctttgtatcggcaccggaaaatgcagcaacctgctttttcaaagatgcttgtttttgagttgcggtgtgattggtcatacatgtcatttcccttctttttcattatgattccaagtataccgaggcgctcggcgcgcttgtagtagcaggcatcatgccccgaatatgacatttgtcatgtttggcggcagaatgctgatcagacgtcatatagagcggttacttttttgcaagggataaagctagactgataaagacaagacgaattcttatcgaagaaaacagcaaaaaagaactccgcctgtttcgggagttcttttttcatcctattcacagcaaaatcacccggtacttcttcacatccaaaaactgcagaaattcccgggccagcacgtccggcgcgtggtcttttccttcatgaagacggtattgaatcaggccgacgagcatggatgcgacatagtatgcgtatagctttttgcccgcctgaatatgcagaggctgatgaagataaaacgattgcagtgctctgaagatctccgggatgacgtcaggcactccggaaccctctctcagaaaatggacgagcggcatgccttccgacagtgcggaaaagagacggacgagcgcggcttccgcttcttccatagagcaatcggcaggctctccttttaccgtcaataatccgatcaaatcctggcatgattgatggatgatcgttttcagcaatccttctttgttggcgtaatggtcataaaaagtggcacggcggagattgctttgacgggcaatatcggaaatcgtaatcgacgcgtaatcttttttttccgccattaagccgatcatagcttcttgcagggcctgtctcgttcggatcacccggcggtcggcaggctttttttcttcctgttctgacacccggcggccgaacagccagtaaaaccgtttttgagaaatcaaatcccacacctgcccgctgatcgcttccggggatgccgcctgatcctcattcagccagtacagaacaatagcatacgtatataaagcgcggtaatgaatgtacatatcctgttcagtcggtgagaaatccgcattgaccggagacagaagcacatcatgccggaacacatctttaaaaaaagcatgaaagtgaaaatacggcattttatgacgatccatcatcgtttggaaaaacacccgatgccggtcaacaaaagacagggtcggatgcactttttgccatcccccatttaaatgaagcacatctttatgcttcagcgaatgataaagcgcttcgctcagaccgtctttcatttcttccgccatatcttctaaaatcgcatatttatcctcgtaataaaggtacaatgtcccccggctcacgtgcgcccgctcggcgatgtccttcatggtcacacggcggatatcccgctctccaagcatagccagaagcgcttgtttgatatcagttgtcacagaatccggcataagagacactccttccattagacagatcaccgcaatttgtacggtaacgtatagatgtgtttacgctgtctttgccgcaaaaacacatcacactataataggccctgaagaaataaaaaagcaaccagaggaggaagaccgatggatcagcatataaaagcagacatcaaacgcgtctttgagcttcagaaaaaaaatcagaaaacgctgcgtgcttcaacagccgagcagcgcagagaaaagcttcagcgctttttagatgccgtcaccgctcatgaagaagaaatcatcgaggcgatcagacgggacgtccgcaagccttatcacgaggtgaaaagagcggaaacgcagggaacgatcaaggcgattaaagataacatgaacaatctcgatacctggatggcgccgaaacgcgtcggctcatccgtcagcccggatgcagacggcgtattaatgtacgagccaaaaggcgtcaccctcattctcggcccatggaattatccgtttatgctgacgatggctccgctcgctgctgccattgcggccggcaacagcgcgattgtaaagctgtccgattttacgatggagacgagccatatcgccgcaacagtcattcgcgaggcatttcacgaagaagaagtcgccatttttgaaggtgaggttgatgtagcgacagaactgctcgaccagccgtttgaccacattttcttcaccggaagcacgaatgtcggtaaaatcgtcatgacggcagcggcgaagcacttgtcatccgtcacgcttgaacttggcggaaaaagtccgacgatcatcgacggcgaatatgatttgatggacgcggcgaaaaaaatcgccgtcggcaaatttgtcaatgcggggcagacatgtatcgctcctgactatctccttatgaagcaagatgtacaggatacctttacagatctcctgcaaaccattgtcaatgcaggttttatggaggatgatcatacggttgaccgcactaaattcacgcagattgtcaatgaccgcaactttaaccgtgtcaaagccctatatgatgatgccattgaaaaaggggcgaaaacggcgttcggcggcgtatttgatgcgcatgaccgcacgatttctccgactgtgctgacaaacgtcactcctgatatgaagatcatgcaggaggaaatttttgcaccgattctgccgattatgaattacgaagatatcagtgaagccgttgattacatcactgaccgggacaagccgcttgccttatatgtattcagccataatcaggagctgatcgattatgtgctgcagcatacgacatccggcaacgcttctatcaatgatgtcgtcgttcatttcactgacgtcaaccttccgttcggcggcgtcaatacgagcgggatcggttcatatcacggtgtatacggctttaaagaattctctcatgaaaaaggcgtatttattcaagcctctaaataaaaaaaagaatccgcgcagatgacgcggattcttttttattatttttttgttccgaatgcgagcagtttcgtaaaagtgccggcgtaaagtgtgccgtcttcagccagaaccggggaggaaatgacgttgctgtccgtttgatagcgccatttttcattaccgtcagcatcaaccgcatagacgtttttatcgtcagagccgaagtacacattgccgtctgcatcaatcagcggagccgttctcacaggcccgtccgtatagaaagaccagttcatgttaccggttttactgatggaaaacagctcaccgcttccagaaccgatatacacattgccgttatggtcaatcgctaatgaagagctggagaaaccgttcaacgggaacgtccattttacagcacccgttgacgtataggcatataggttgccgtcttggtttccggcgtaaacggtgccgtctttatcaataaccggatatcctttaaacccgttggatgtcgtttttgaccatttcacttggcccgttcctgaattgatcgcgtaaaagatattattgtacgttgccgtatataaagtgccgtttgacgctaacacgggagcggagccgaccacaccgtttgttttaaatttccacttttccgtccatgtcgaaggagacgtcggtttaatcgcatagatatagttatccagcgtcgacacatacagcgtgccgtcagagccgatagccgcatcggaactcggcgctccgctcagcggaactgatgtcaaaatgtttccggtttctttgtcgatgaaatacagttttttgtcatgagacggaagataaatgacaccgtttgttccgagcaccggggtcagcgtataggttgtcccgaggttttccgtcacccatttcacagtaccgtccggatgatacgccgtcagcttcccgtcttttgattgaataaacacggtaccgtccccgtcaaccgcggctcccgcaccgttttgaggattggccggtacatttttttcccattttaatgcgccgtcggcattgcttgtaaaccggctttcccttgaccagttgaacatcgtcggagacatggcctgctcgtcataccgtcccgtcaagaaaccggatgcagcgtgattttgtttaaataccgtttccgcagcttgagcagcggccggatgcagccattttcccgccggcagatcagaaaccgctcccacagataaagccgcagcaaccgcagcgccggccgccaatgttttcattcgaagtgaagctgtcctttttttcaatgtcagttcctcccgtttctattaaaaactgctatacgccatgatcataccataatcatcctatgaaatatttgtattttcgttaaattatagaacaaatgtcacatagcctgctgatgctttggatatgagcgaaatgcgataatgtaccacatcacattgacgataaaagccgctcctgaccaaacgagaagaccgtaataaagagacagctcctgttccgaagaagttatgaccaatagcgtcaccaaaaagacagccgcacaaatgataagcccgattccgcaaaaaacggccatgatgattttcatgacacgaacaccgagaatatacataacgagcgggaccgcatatataaaaaggatctgaccgacggcggcccacatccccaaggagttaaagcgattcgcgttcggccccgtttctgcaaacggagaaagcgagccgacgaccggcaataaacaaaacatcagagcggaaagcagtgtcaccgcaaccgcacctttcttcttttgattcatgtgaatatcctcctgacaataacccggcttttttaccgttattttaataatatgttatatgttaacacgatttttactttatttgagaatgttttgttaaaaacgaatttacaaatccagaaaaatagatataataaacgttatggaaccgatattgattcataaagcgttatctaacaaaacacgaagtgacattatgacatggctcaaacacccggaggaccattttgatgaaaagccttatcttgagcagggcctcagtttccgcaccggaatttgcgtcggtgatattcaggcgaaatcagggcttgcgcagtctgtcatctccagctacctgctgacgatgcaaaaagccggcctgctggaatctgaacgaatcggaaaatggacttattacagaaggaatgaaaaacaaattaaagcctttgctgactatgtacagcaccagctataacgatgaaaggagggctttttccgctttaacatatctatttttctgtatatgtagttacaaaaggaggcatacataacaatgaaaaaaagcagttccatcttcattctatttttggcattaggggttttcggcattatcacgaccgaaatgggcattatcggtgttcttccgcaagtggccgacagatttcacatcaccgcttcaaaggcgggatggctcgtcagtatctttgcgttcatcgtcgctgtgtcagggccgtttttgaccttgcttgcttcaggcataaaccggaaattcattctgcttttggctgtgctgatgtttgccatttcaaatgcggtctatgcgtatacggcgcatttcagtgtcatgcttgcgtttcggatcattcccgctttatgccacccggtgttcttttctgtagcgcttgctgctgcggcccgtcttgtccccgccggccaatccggaaaagccgtaacgaaagttttttcaggcatcaccgccgggtttgcgttcggcgtgcctttcacgtcttatctggcggagcgtctctcccttgaatcggccttcctattcggcgctatcgtcagtatcatcgcttttatgggcattcttctctttttgccatccatgccggtcacagaaaaaatgtctttcagaagccagctcggcatccttcgcaaaccggctttgtggctcaatatcattgccgtcatctgtctgtttgcggccatgttttctgtctacagctatttcgcggaatacctcggtcgggtgtcccatatgaacggcacatgggtcagctttatgctgatgacgttcggggtgattatgatagccgggaatttcgtcttcggcgctttgttatacaaaaatatgaaaaagaccgtcatcgtgtttccgcttctttatacggccgcctacttgctcatatacgggtttgggacgtctttcgcaccgatggctgtgctcgtcttcgtatggggcgccgttcattccggcgggctcattgtcagccagacatggctgactgcggaagcaaaggaggcacctgaattcggaaacagcctgtttgtctccttttccaacctcggcatcaccatcggaacagcggcgggcggctggtttatttcacatctggggattcatcagctgatgtggtgcggcatcatgttctcccttctggctttcgggctgatcatggggcgcttggcatggggaaagaggccgctcgcagaagcttgagctctgttgcaaaatccggcatgtttacgtataatatgccagattacgacaagggagagaaaaagatacatggaaagaccggcaggattttggattcggtttctggcttatgtcattgatcagatcatcataggaattccaatttttatcattcaatttatagtcacttttttatttgcggcaggcgctgctgcggctgaccccttgatgaccgaaaatcagtttaccatttcgtttctgatattcggcgtcatcccgattcttctgatctctattgtgatcagcatcttatatttcagcctgctcactgcctcaaagatgcaggggacactgggaaaagcattgctcggccttaaggtcgtcgctgaagatggcggacggatttccatcggccaggccttcgggcgcgctttcgcttctatcctatctaagctcattctttatatcggtttcatcatggccgccttcggtgagaaaaaaacgctgcacgacatcatatgcagcacgcgtgttgtctataaataatgtctctaagtccgggccttttgagcccggactattttatgacggctgagcccgcctgatgtcaatgccgccttttccgtcagcctcaatgcggatcgtcccgttcacaatgacagacagcggatggaactccgcatactgatcagaaaaaatccagcggcgtccgttcggccctaaaagcaaaaacgccccatcattatagtcccccataaaatgaaacccgtcttccctaagagacgaatggtctctcaccggaataccgaaacgctgcagctttctcccggtggatacgacttcagcagccgtcagattcacctcgccgatattcagaacggattcaattgaaaagcgttccgcgcttgccggcgacgtttctctcgcgatgaattccgccagattgccggacggatctttaaaataaaaggaacgcgccttaatatgagagaaatacacctcatcctccccgtcttccgtttgaaaaacgactttatcctttatccacgctttcgcctcgtcaaaacgattgttcggaatgttaaacgcgaaatgataattcggatgagattgagaatcggtgcgcctgaattccaattcactttctcccgctttgattgtaaatgaatcaccggacgcctcaattaaagaaaaacctaacacccgttcatagaagtgtttcgtctcctccagagcacaactgtacaaagttatgttatttatttgcatgaccataccccctttggtttatactgccatatagaggggttgattcccactattttgtttcaaccaattgagaatccccctttcgcccggcgctaaacatgaaaaacagcgctaaaccgcttatacctagggttttttaacgtctaaagcaaaaaaagcagaaaataataccccatatagcttgacaaaaaataaatgttatttaataatctatatataattagaattattattgaaagataaagtgaatgctttgtctttttaatatatttcaaatcacatttcaggaggaagatattatgtctttaatcggaaaagaagtactgccattcgaagcaaaagctttcaaaaacggtgaattcatcgatgtaacaaacgaagatttgaaaggtcaatggagcgttttctgcttctacccagcagatttctctttcgtatgcccgactgaacttgaagatcttcaagaacaatacgctgcactgaaagaattaggtgttgaagtatactctgtttctacagatactcacttcgtacacaaaggctggcatgacagctctgaaaaaatcggcaaaatcacttacgcaatgatcggtgacccatctcaaacgatctctcgcaatttcgacgttcttgacgaagaaagcggacttgctgaccgcggaacattcatcatcgatccggatggcgtcatccaaacagttgaaatcaatgcaggcggtatcggccgtgacgcaagcaaccttgtaaataaagtaaaagcagctcaatacgttcgtcaaaacccaggtgaagtctgcccggctaaatgggaagaaggcggcgaaacacttacacctagccttgatctggtaggtaaaatctaaggagtgcattcaattggtacttgatgcaaatatcaaagcacaattaaatcaatatatgcagctaattgagaacgacatcgttctcaaagtaagcgccggtgacgatgacacgtctaaggatatgctggctctcgttgacgagctggcttccatgtcatctaaaatttcagttgaacaagctgaattatacagaacaccaagcttcagcgttaatcgtgcaggagaagacacaggcgttacattcgccggtgttcctctcggccacgaatttacttcattagtgctcgcattgcttcaagtcagcggcagagcgcctaaggctgatcaaaaggtcattgaccagattaagaacatcagcggagaataccgctttgagtcttatatcagcctgacgtgccacaactgccctgatgttgtccaagcattaaacatgatgagcgtgcttaacccgaatatcacacatacaatgattgacggcgcggcattcaaagaagaagttgaaagcaaaaacatcatggctgttccgactgttttcttaaacggtgaatctttcggcagcggccgtatgaccctcgaagagattctcgcgaaattgggcagcggcgcagatgcatctgagtttgctgacaaagagccgtttgacgttcttgtggtcggcggcggaccggccggcgcaagcgcggccatctacacggcgcgtaaaggcatccgcacaggtgtcgtcgctgaacgcttcggcggtcaggtactcgacaccatgagcatcgaaaacttcatcagcgtcaaagcgactgaaggaccgaagctcgctgcaagccttgaagagcacgtgaaagattatgatattgacgtcatgaatctgcagcgcgcgaaacgccttgagaaaaaagacctcttcgaacttgaactcgaaaacggcgctgtcctgaaaagtaaaacagtgatcctgtcaacaggtgcccgctggcgcaatgtcaacgtacctggtgagcaagagttcaaaaacaaaggtgtcgcttactgcccgcactgtgacggaccattgtttgaaggcaaagacgtagcggttatcggcggcggaaactccggaatcgaagcggcgattgaccttgcaggtatcgtcaatcacgtgactgtgctggagttcgcgcctgaactgaaagcagacgaagttctgcaaaaacgtctctacagcctgccaaacgtgactgtacacaaaaatgcacaaacaaaagaaatcacaggcgaccaaaacgtaaacggcatcacgtatattgaccgtgaaacaggcgaagaaaaacacgttgaactccaaggtgtattcgtccaaatcggtctcgtgccaaacacagaatggttagacgaaacggtcgaacgcaaccgcatcggcgaaatcatcgtcgacaagagcggcgcgacaagcgttcccggcctattcgccgcaggggactgcacagacggcccgtacaaccaaatcattatctcaatgggatcaggtgcaactgccgctttaggcgcatttgattatttgatccggaactagttcccaaaggcgctatactgcttaaacggcagtatggcgcttttttatgttacagtccatataaataggacttcacatcaggaccgacaaacgctttccatatgatcaaattgtacggataggaccagttaatatcctgccgtgactcatcaaacatttgatgcagccggttgctgttaaaaatgatcgaccctttttgatcgaaagccaccccgtcgacccaaagcattctgtcatccgagacgaactgatgaaagctgttatcttcaggctggtaaatgccgatgcctttcccctcaagcatagtgtaaaaaaccttcccctgatgatcagcatgcataccatcagttgtcgtgcccttgcttcccaccgctcgaacggacttcgaaatcacttccagaggcgtttgaaaatcctgcaggagagatgtatcaatcgcatataaattccggcccgtgacctgacaatagtaaagaaccgtccgttctccggacagtgcgattccatccgctccgatctttaccggcttgtttgtaaacaccggccggttatcaatctcaaaatgaaatcccggaaagtcctgcgtgctgaaatgccggtcaagcacgcgccggaaagtccttgttcttatgttaaacacaatgattcccccatcaagcggatggtccggccagccattacccgaatccgtgatataggcaaacccatttttattgtcaacgacaacatcatttaagaaagacgtgcggtaattggcaatctcattcggaatctgaattgaatcgatcagctgattgcggtctaaatcaatgatcacaagcttctgtgagccttccggtgacctttcataggcaattttcccttggtcaagaatccacatccgattgtattcatcaatctcgtaccccaagacggactggagaacagccgggtttccagcccgattccactcccagcttggaaaggcctctaataacggcttcccgtcttttatcacaatcttgttcaaggtagccggaacaccgtgagcccagcggggaaccgacacataataatgcccctgccgatccattttaatgccggccggcatacactttttccaatattcctttttgtaaaattcttttttcatctcatcattcggaaaatcccaatctaaatggttccaatgaaatatcatttcatagtgtcctcttctgcccggcagcgtcccgtattctcttaatagataggaatcagcataagcggggtatgacgattgtccattcatgtacgaattgttttccatgactccattcctctcgttctatatctacattaaatatatgcctataaaaggaaacggttaattaaaaataaagacggcatactgcatgcagtacaccgtctttttcaagagatttaatttgactcatcatgttcttgttgccctgttttttctcatccaatataaaataaataatccaataaaccacagcggcgtcagcagcaaagccgggcgcgtcgcatccgcaaacagcataataaccagaatgaccgcaaacagcgccagaacaacgtaattgataaacggcgcgaacggcgctttgaatgttgatgccgcgtgtaagtccggccgggttttcctgtatctgatatggcagacaagaatcacaccccacacccaaatgaaacaaatcgcgctgatggttgtcacgatgccaaaggcttcttccggaatcaatttgcttaaaagtgcccctgctgacaggacaatgaccgacacccataacgcgcggctcggcacatgatttttattcagcttctcgaaacttgccggcgcctgtttcgttttgcttaagttatacaaaatccggcttgttgaaaacattccgctgttacaagcagaagcggctgacgttaatacgacgaaattaatgattcccgcggccagcggaatgccgactaagctgaaggtcttcacaaaaggactttccgccgcattcagctgcgtccaagggttaatacataagaggatgatcaatgccccgacgtagaaaaataaaatacgcaaaggaattttattgatcgcggacggaatgttttttttcggatttgatgtttccgctgccgacacaccgactaattccacaccgacataggcaaagatcaccatctggaacgaaagcaaaaagcctgaaaatccgtttggaaacaagccgccgtgcacccacagattcgctgctgaaaccgttccagtatgcgttttgaacccaatcaccagcaaaatcaccccgatgacgattaacgcgaggatcgtgatcaccttaattaaagcgaaccaaaactccaattctccaaaaatcttgaccgttaacagattaagccccaataaaatgagcaaacagatcagtgcaggaatccactgcggaatatcaaaccaatatttcacatacacaccgacggcgatcacatccgccatagccgtcataatccagcaaaaccaataggtccagccggtgacaaacgctgcccgcggccctaaatacgcctcggcgatatccgttaatgattggtaccccgctttagataaaagcagttctcccagcgaccgcataacgaaaaaaagcgcaatacctacaataaaatacgcaaagatgatagaag
